(19) United States
(12) Patent Application Publication
(10) Pub. No.: US 2005/0255568 A1
(43) Pub. Date: Nov. 17, 2005

(54) Methods and compositions for amino acid production

(76) Inventors: Richard B. Bailey, South Natick, MA (US); Paul Blomquist, Roslindale, MA (US); Reed Doten, Framingham, MA (US); Edward M. Driggers, Arlington, MA (US); Kevin T. Madden, Arlington, MA (US); Jessica O'Leary, Somerville, MA (US); George O'Toole, Hanover, NH (US); Joshua Trueheart, Concord, MA (US); Michael J. Walbridge, Dorchester, MA (US); Peter S. Yorgey, Cambridge, MA (US)

Correspondence Address: FISH & RICHARDSON PC, 225 FRANKLIN ST, BOSTON, MA, 02110, US

(21) Appl. No.: 10/858,730

(22) Filed: Jun. 1, 2004

Related U.S. Application Data
(60) Provisional application No. 60/475,000, filed on May 30, 2003.
(60) Provisional application No. 60/551,860, filed on Mar. 10, 2004.

(51) Int. Cl. C12P 13/12; C12N 9/06; C12N 9/10; C12N 1/21

(52) U.S. Cl. 435/113; 435/252.33; 435/191; 435/193

(57) ABSTRACT

Methods and compositions for amino acid production using genetically modified bacteria are disclosed.

### CROSS-REFERENCE TO RELATED APPLICATIONS

[0001] This application claims the benefit of priority of U.S. Ser. No. 60/475,000, filed May 30, 2003, and U.S. Ser. No. 60/551,860, filed Mar. 10, 2004. The entire contents of these applications are hereby incorporated by reference.

### TECHNICAL FIELD

[0002] This invention relates to microbiology and molecular biology, and more particularly to methods and compositions for amino acid production.

### BACKGROUND

[0003] Industrial fermentation of bacteria is used to produce commercially useful metabolites such as amino acids, nucleotides, vitamins, and antibiotics. Many of the bacterial production strains that are used in these fermentation processes have been generated by random mutagenesis and selection of mutants (Demain, A. L. Trends Biotechnol. 18:26-31, 2000). Accumulation of secondary mutations in mutagenized production strains and derivatives of these strains can reduce the efficiency of metabolite production due to altered growth and stress-tolerance properties. The availability of genomic information for production strains and related bacterial organisms provides an opportunity to construct new production strains by the introduction of cloned nucleic acids into naive, unmanipulated host strains, thereby allowing amino acid production in the absence of deleterious mutations (Ohnishi, J., et al. Appl Microbiol Biotechnol. 58:217-223, 2002). Similarly, this information provides an opportunity for identifying and overcoming the limitations of existing production strains.

### SUMMARY

[0004] The present invention relates to compositions and methods for production of amino acids and related metabolites in bacteria. In various embodiments, the invention features bacterial strains that are engineered to increase the production of amino acids and related metabolites of the aspartic acid family. The strains can be engineered to harbor one or more nucleic acid molecules (e.g., recombinant nucleic acid molecules) encoding a polypeptide (e.g., a polypeptide that is heterologous or homologous to the host cell) and/or they may be engineered to increase or decrease expression and/or activity of polypeptides (e.g., by mutation of endogenous nucleic acid sequences). These polypeptides, which can be expressed by various methods familiar to those skilled in the art, include variant polypeptides, such as variant polypeptides with reduced feedback inhibition. These variant polypeptides may exhibit reduced feedback inhibition by a product or intermediate of an amino acid biosynthetic pathway, such as S-adenosylmethionine, lysine, threonine or methionine, relative to wild type forms of the proteins. Also featured are the variant polypeptides encoded by the nucleic acids, as well as bacterial cells comprising the nucleic acids and the polypeptides. Combinations of nucleic acids, and cells that include the combinations of nucleic acids, are also provided herein. The invention also relates to improved bacterial production strains, including, without limitation, strains of coryneform bacteria and Enterobacteriaceae (e.g., Escherichia coli (E. coli)).

[0005] Bacterial polypeptides that regulate the production of an amino acid from the aspartic acid family of amino acids or related metabolites include, for example, polypeptides involved in the metabolism of methionine, threonine, isoleucine, aspartate, lysine, cysteine and sulfur, such as enzymes that catalyze the conversion of intermediates of amino acid biosynthetic pathways to other intermediates and/or end product, and polypeptides that directly regulate the expression and/or function of such enzymes. The following list is only a partial list of polypeptides involved in amino acid synthesis: homoserine O-acetyltransferase, O-acetylhomoserine sulfhydrylase, methionine adenosyltransferase, cystathionine beta-lyase, O-succinylhomoserine (thio)-lyase/O-acetylhomoserine (thio)-lyase, the McbR gene product, homocysteine methyltransferase, aspartokinases, pyruvate carboxylase, phosphoenolpyruvate carboxylase, aspartate aminotransferase, aspartate semialdehyde dehydrogenase, homoserine dehydrogenase, dihydrodipicolinate synthase, dihydrodipicolinate reductase, N-succinyl-LL-diaminopimelate aminotransferase, tetrahydrodipicolinate N-succinyltransferase, N-succinyl-LL-diaminopimelate desuccinylase, diaminopimelate epimerase, diaminopimelate decarboxylase, diaminopimelate dehydrogenase, glutamate dehydrogenase, 5-methyltetrahydropteroyltriglutamate-homocysteine methyltransferase, serine hydroxymethyltransferase, 5,1 0-methylenetetrahydrofolate reductase, serine O-acetyltransferase, D-3-phosphoglycerate dehydrogenase, and homoserine kinase.

[0006] Heterologous proteins may be encoded by genes of any bacterial organism other than the host bacterial species. The heterologous genes can be genes from the following, non-limiting list of bacteria: Mycobacterium smegmatis; Amycolatopsis mediterranei; Streptomyces coelicolor; Thermobifida fusca; Erwinia chrysanthemi; Shewanella oneidensis; Lactobacillus plantarum; Bifidobacterium longum; Bacillus sphaericus; and Pectobacterium chrysanthemi. Of course, heterologous genes for host strains from the Enterobacteriaceae family also include genes from coryneform bacteria. Likewise, heterologous genes for host strains of coryneform bacteria also include genes from Enterobacteriaceae family members. In certain embodiments, the host strain is Escherichia coli and the heterologous gene is a gene of a species other than a coryneform bacteria. In certain embodiments, the host strain is a coryneform bacteria and the heterologous gene is a gene of a species other than Escherichia coli. In certain embodiments, the host strain is Escherichia coli and the heterologous gene is a gene of a species other than Corynebacterium glutamicum. In certain embodiments, the host strain is Corynebacterium glutamicum and the heterologous gene is a gene of a species other than Escherichia coli.

[0007] In various embodiments, the polypeptide is encoded by a gene obtained from an organism of the order Actinomycetales. In various embodiments, the heterologous nucleic acid molecule is obtained from Mycobacterium smegmatis, Streptomyces coelicolor, Thermobifida fusca, Amycolatopsis mediterranei, or a coryneform bacteria. In various embodiments, the heterologous protein is encoded by a gene obtained from an organism of the family Enterobacteriaceae. In various embodiments, the heterologous nucleic acid molecule is obtained from Erwinia chysanthemi or Escherichia coli.

[0008] In various embodiments, the host bacterium (e.g., coryneform bacterium or bacterium of the family Enterobacteriaceae) also has increased levels of a polypeptide encoded by a gene from the host bacterium (e.g., from a coryneform bacterium or a bacterium of the family Enterobacteriaceae such as an Escherichia coli bacterium). Increased levels of a polypeptide encoded by a gene from the host bacterium may result from one of the following: introduction of additional copies of a gene from the host bacterium under the naturally occurring promoter; introduction of additional copies of a gene from the host bacterium under the control of a promoter, e.g., a promoter more optimal for amino acid production than the naturally occurring promoter, either from the host or a heterologous organism; or the replacement of the naturally occurring promoter for the gene from the host bacterium with a promoter more optimal for amino acid production, either from the host or a heterologous organism. Vectors used to generate increased levels of a protein may be integrated into the host genome or exist as an episomal plasmid.

[0009] In various embodiments, the host bacterium has reduced activity of a polypeptide (e.g., a polypeptide involved in amino acid synthesis, e.g., an endogenous polypeptide) (e.g., decreased relative to a control). Reducing the activity of particular polypeptides involved in amino acid synthesis can facilitate enhanced production of particular amino acids and related metabolites. In one embodiment, expression of a dihydrodipicolinate synthase polypeptide is deficient in the bacterium (e.g., an endogenous dapA gene in the bacterium is mutated or deleted). In various embodiments, expression of one or more of the following polypeptides is deficient: an mcbR gene product, homoserine dehydrogenase, homoserine kinase, methionine adenosyltransferase, homoserine O-acetyltransferase, and phosphoenolpyruvate carboxykinase.

[0010] In various embodiments the nucleic acid molecule comprises a promoter, including, for example, the lac, trc, trcRBS, phoA, tac, or λP_{L}/λP_{R} promoter from E. coli (or derivatives thereof) or the phoA, gpd, rplM, or rpsJ promoter from a coryneform bacteria.

[0011] In one aspect, the invention features a host bacterium (e.g., a coryneform bacterium or a bacterium of the family Enterobacteriaceae such as an Escherichia coli bacterium) comprising at least one (two, three, or four) of: (a) a nucleic acid molecule comprising a sequence encoding a heterologous bacterial aspartokinase polypeptide or a functional variant thereof; (b) a nucleic acid molecule comprising a sequence encoding a heterologous bacterial aspartate semialdehyde dehydrogenase polypeptide or a functional variant thereof; (c) a nucleic acid molecule comprising a sequence encoding a heterologous bacterial phosphoenolpyruvate carboxylase polypeptide or a functional variant thereof; (d) a nucleic acid molecule comprising a sequence encoding a heterologous bacterial pyruvate carboxylase polypeptide or a functional variant thereof; (e) a nucleic acid molecule comprising a sequence encoding a heterologous bacterial dihydrodipicolinate synthase polypeptide or a functional variant thereof; (f) a nucleic acid molecule comprising a sequence encoding a heterologous bacterial homoserine dehydrogenase polypeptide or a functional variant thereof; (g) a nucleic acid molecule comprising a sequence encoding a heterologous bacterial homoserine O-acetyltransferase polypeptide or a functional variant thereof; (h) a nucleic acid molecule comprising a sequence encoding a heterologous bacterial O-acetylhomoserine sulfhydrylase polypeptide or a functional variant thereof; (i) a nucleic acid molecule comprising a sequence encoding a heterologous bacterial methionine adenosyltransferase polypeptide or a functional variant thereof; (j) a nucleic acid molecule comprising a sequence encoding a heterologous bacterial mcbR gene product polypeptide or a functional variant thereof; (k) a nucleic acid molecule comprising a sequence encoding a heterologous bacterial O-succinylhomoserine/acetylhomoserine (thiol)-lyase polypeptide or a functional variant thereof; (l) a nucleic acid molecule comprising a sequence encoding a heterologous bacterial cystathionine beta-lyase polypeptide or a functional variant thereof; (m) a nucleic acid molecule comprising a sequence encoding a heterologous bacterial 5-methyltetrahydrofolate homocysteine methyltransferase polypeptide or a functional variant thereof; and (n) a nucleic acid molecule comprising a sequence encoding a heterologous bacterial 5-methyltetrahydropteroyltriglutamate-homocysteine methyltransferase polypeptide or a functional variant thereof.

[0012] In various embodiments, the nucleic acid molecule is an isolated nucleic acid molecule (e.g., the nucleic acid molecule is free of nucleotide sequences that naturally flank the sequence in the organism from which the nucleic acid molecule is derived, e.g., the nucleic acid molecule is a recombinant nucleic acid molecule).

[0013] In various embodiments, the bacterium comprises nucleic acid molecules comprising sequences encoding two or more distinct heterologous bacterial polypeptides, wherein each of the heterologous polypeptides encodes the same type of polypeptide (e.g., the bacterium comprises nucleic acid molecules comprising sequences encoding an aspartokinase from a first species, and sequences encoding an aspartokinase from a second species.)

[0014] In various embodiments, the polypeptide is selected from an Enterobacteriaceae polypeptide, an Actinomycetes polypeptide, or a variant thereof. In various embodiments, the polypeptide is a polypeptide of one of the following Actinomycetes species: Mycobacterium smegmatis, Streptomyces coelicolor, Thermobifida fusca, Amycolatopsis mediterranei and coryneform bacteria, including Corynebacterium glutamicum. In various embodiments, the polypeptide is a polypeptide of one of the following Enterobacteriaceae species: Erwinia chysanthemi and Escherichia coli.

[0015] In various embodiments, the polypeptide is a variant polypeptide with reduced feedback inhibition (e.g., relative to a wild-type form of the polypeptide). In various embodiments, the bacterium further comprises additional heterologous bacterial gene products involved in amino acid production. In various embodiments, the bacterium further comprises a nucleic acid molecule encoding a heterologous bacterial polypeptide described herein (e.g., a nucleic acid molecule encoding a heterologous bacterial homoserine dehydrogenase polypeptide). In various embodiments, the bacterium further comprises a nucleic acid molecule encoding a homologous bacterial polypeptide (i.e., a bacterial polypeptide that is native to the host species or a functional variant thereof), such as a bacterial polypeptide described herein. The homologous bacterial polypeptide can be expressed at high levels and/or conditionally expressed. For example, the nucleic acid encoding the homologous bacterial polypeptide can be operably linked to a promoter that allows expression of the polypeptide over wild-type levels, and/or the nucleic acid may be present in multiple copies in the bacterium.

[0016] In various embodiments the heterologous bacterial aspartokinase or functional variant thereof is chosen from: (a) a Mycobacterium smegmatis aspartokinase polypeptide or a functional variant thereof, (b) an Amycolatopsis mediterranei aspartokinase polypeptide or a functional variant thereof, (c) a Streptomyces coelicolor aspartokinase polypeptide or a functional variant thereof, (d) a Thermobifidafusca aspartokinase polypeptide or a functional variant thereof, (e) an Erwinia chrysanthemi aspartokinase polypeptide or a functional variant thereof, and (f) a Shewanella oneidensis aspartokinase polypeptide or a functional variant thereof. In certain embodiments, the heterologous bacterial aspartokinase polypeptide is an Escherichia coli aspartokinase polypeptide or a functional variant thereof. In certain embodiments, the heterologous bacterial aspartokinase polypeptide is a Corynebacterium glutamicum aspartokinase polypeptide or a functional variant thereof. In certain embodiments the heterologous bacterial asparatokinase polypeptide or functional variant thereof has reduced feedback inhibition.

[0017] In various embodiments the heterologous bacterial aspartate semialdehyde dehydrogenase polypeptide or functional variant thereof is chosen from: (a) a Mycobacterium smegmatis aspartate semialdehyde dehydrogenase polypeptide r a functional variant thereof, (b) an Amycolatopsis mediterranei asp artate semi aldehyde dehydrogenase polypeptide or a functional variant thereof, (c) a Streptomyces coelicolor aspartate semialdehyde dehydrogenase polypeptide or a functional variant thereof, and (d) a Thermobifida fusca aspartate semialdehyde dehydrogenase polypeptide or a functional variant thereof. In certain embodiments, the heterologous bacterial aspartate semialdehyde dehydrogenase polypeptide is an Escherichia coli aspartate semialdehyde dehydrogenase polypeptide or a functional variant thereof. In certain embodiments, the heterologous bacterial aspartate semialdehyde dehydrogenase polypeptide is a Corynebacterium glutamicum aspartate semialdehyde dehydrogenase polypeptide or a functional variant thereof. In various embodiments the heterologous bacterial phosphoenolpyruvate carboxylase polypeptide or functional variant thereof is chosen from: (a) a Mycobacterium smegmatis phosphoenolpyruvate carboxylase polypeptide or a functional variant thereof, (b) a Streptomyces coelicolor phosphoenolpyruvate carboxylase polypeptide or a functional variant thereof, (c) a Thermobifida fusca phosphoenolpyruvate carboxylase polypeptide or a functional variant thereof, and (d) an Erwinia chrysanthemi phosphoenolpyruvate carboxylase polypeptide or a functional variant thereof. In certain embodiments, the heterologous bacterial phosphoenolpyruvate carboxylase polypeptide is an Escherichia coli phosphoenolpyruvate carboxylase polypeptide or a functional variant thereof. In certain embodiments, the heterologous bacterial phosphoenolpyruvate carboxylase polypeptide is a Corynebacterium glutamicum phosphoenolpyruvate carboxylase polypeptide or a functional variant thereof.

[0018] In various embodiments the heterologous bacterial pyruvate carboxylase polypeptide or functional variant thereof is chosen from: (a) a Mycobacterium smegmatis pyruvate carboxylase polypeptide or a functional variant thereof, (b) a Streptomyces coelicolor pyruvate carboxylase polypeptide or a functional variant thereof, and (c) a Thermobifida fusca pyruvate carboxylase polypeptide or a functional variant thereof. In certain embodiments, the heterologous bacterial pyruvate carboxylase polypeptide is a Corynebacterium glutamicum pyruvate carboxylase or a functional variant thereof.

[0019] In various embodiments the bacterium is chosen from a coryneform bacterium or a bacterium of the family Enterobacteriaceae such as an Escherichia coli bacterium. Coryneform bacteria include, without limitation, Corynebacterium glutamicum, Corynebacterium acetoglutamicum, Corynebacterium melassecola, Corynebacterium thermoaminogenes, Brevibacterium lactofermentum, Brevibacterium lactis, and Brevibacterium flavum.

[0020] In various embodiments: the Mycobacterium smegmatis aspartokinase polypeptide comprises SEQ ID NO: 1 or a variant sequence thereof, the Amycolatopsis mediterranei aspartokinase polypeptide comprises SEQ ID NO:2 or a variant sequence thereof, the Streptomyces coelicolor aspartokinase polypeptide comprises SEQ ID NO:3 or a variant sequence thereof, the Thermobifida fusca aspartokinase polypeptide comprises SEQ ID NO:4 or a variant sequence thereof, the Erwinia chrysanthemi aspartokinase polypeptide comprises SEQ ID NO:5 or a variant sequence thereof, and the Shewanella oneidensis aspartokinase polypeptide comprises SEQ ID NO:6 or a variant sequence thereof, the Escherichia coli aspartokinase polypeptide comprises SEQ ID NO: 203 or a variant sequence thereof, the Corynebacterium glutamicum aspartokinase polypeptide comprises SEQ ID NO: 202 or a variant sequence thereof, the Corynebacterium glutamicum aspartate semialdehyde dehydrogenase polypeptide comprises SEQ ID NO:204 or a variant sequence thereof, the Escherichia coli aspartate semialdehyde dehydrogenase polypeptide comprises SEQ ID NO: 205 or a variant sequence thereof, the Mycobacterium smegmatis phosphoenolpyruvate carboxylase polypeptide or functional variant thereof comprises an amino acid sequence at least 80% identical to SEQ ID NO:8 (M. leprae phosphoenolpyruvate carboxylase) (e.g., a sequence at least 80%, 85%, 90%, 92%, 94%, 95%, 96%, 97%, 98%, 99% or more identical to SEQ ID NO:8), the Streptomyces coelicolor phosphoenolpyruvate carboxylase polypeptide comprises SEQ ID NO:9 or a variant sequence thereof, the Thermobifida fusca phosphoenolpyruvate carboxylase polypeptide comprises SEQ ID NO:7 or a variant sequence thereof, the Erwinia chrysanthemi phosphoenolpyruvate carboxylase polypeptide comprises SEQ ID NO:10 or a variant sequence thereof, the Mycobacterium smegmatis pyruvate carboxylase polypeptide comprises SEQ ID NO:13 or a variant sequence thereof, the Streptomyces coelicolor pyruvate carboxylase polypeptide comprises SEQ ID NO: 12 or a variant sequence thereof, and the Corynebacterium glutamicum pyruvate carboxylase polypeptide comprises SEQ ID NO:208 or a variant sequence thereof.

[0021] In various embodiments, the Mycobacterium smegmatis aspartokinase polypeptide comprises at least one amino acid change chosen from: an alanine changed to a Group 1 amino acid residue at position 279; a serine changed to a Group 6 amino acid residue at position 301; a threonine changed to a Group 2 amino acid residue at position 311; and a glycine changed to a Group 3 amino acid residue at position 345; the Mycobacterium smegmatis aspartokinase comprises at least one amino acid change chosen from: an alanine changed to a proline at position 279, a serine changed to a tyrosine at position 301, a threonine changed to an isoleucine at position 311, and a glycine changed to an aspartate at position 345.

[0022] In various embodiments, the Amycolatopsis mediterranei aspartokinase polypeptide comprises at least one amino acid change chosen from: an alanine changed to a Group 1 amino acid residue at position 279; a serine changed to a Group 6 amino acid residue at position 301 ;a threonine changed to a Group 2 amino acid residue at position 311; and a glycine changed to a Group 3 amino acid residue at position 345.

[0023] In various embodiments the Amycolatopsis mediterranei aspartokinase polypeptide comprises at least one amino acid change chosen from: an alanine changed to a proline at position 279; a serine changed to a tyrosine at position 301; a threonine changed to an isoleucine at position 311; and a glycine changed to an aspartate at position 345.

[0024] In various embodiments the Streptomyces coelicolor aspartokinase polypeptide comprises at least one amino acid change chosen from: an alanine changed to a Group 1 amino acid residue at position 282; a serine changed to a Group 6 amino acid residue at position 304; a serine changed to a Group 2 amino acid residue at position 314; and a glycine changed to a Group 3 amino acid residue at position 348.

[0025] In various embodiments the Streptomyces coelicolor aspartokinase polypeptide comprises at least one amino acid change chosen from: an alanine changed to a proline at position 282; a serine changed to a tyrosine at position 304; a serine changed to an isoleucine at position 314; and a glycine changed to an aspartate at position 348.

[0026] In various embodiments the Erwinia chrysanthemi aspartokinase polypeptide comprises at least one amino acid change chosen from: a glycine changed to a Group 3 amino acid residue at position 328; a leucine changed to a Group 6 amino acid residue at position 330; a serine changed to a Group 2 amino acid residue at position 350; and a valine changed to a Group 2 amino acid residue other than valine at position 352.

[0027] In various embodiments the Erwinia chrysanthemi aspartokinase polypeptide comprises at least one amino acid change chosen from: a glycine changed to an aspartate at position 328; a leucine changed to a phenylalanine at position 330; a serine changed to an isoleucine at position 350; and a valine changed to a methionine at position 352.

[0028] In various embodiments the Shewanella oneidensis aspartokinase polypeptide comprises at least one amino acid change chosen from: a glycine changed to a Group 3 amino acid residue at position 323; a leucine changed to a Group 6 amino acid residue at position 325; a serine changed to a Group 2 amino acid residue at position 345; and a valine changed to a Group 2 amino acid residue other than valine at position 347.

[0029] In various embodiments the Shewanella oneidensis aspartokinase polypeptide comprises at least one amino acid change chosen from: a glycine changed to an aspartate at position 323; a leucine changed to a phenylalanine at position 325; a serine changed to an isoleucine at position 345; and a valine changed to a methionine at position 347.

[0030] In various embodiments the Corynebacterium glutamicum aspartokinase polypeptide comprises at least one amino acid change chosen from: an alanine changed to a Group 1 amino acid other than alanine at position 279; a serine changed to a Group 6 amino acid residue at position 301; a threonine changed to a Group 2 amino acid residue at position 311; and a glycine changed to a Group 3 amino acid residue at position 345.

[0031] In various embodiments the Corynebacterium glutamicum aspartokinase polypeptide comprises at least one amino acid change chosen from: an alanine changed to a proline at position 279; a serine changed to a tyrosine at position 301; a threonine changed to an isoleucine at position 311; and a glycine changed to an aspartate at position 345.

[0032] In various embodiments the Escherichia coli aspartokinase polypeptide comprises at least one amino acid change chosen from: a glycine changed to a Group 3 amino acid residue at position 323; a leucine changed to a Group 6 amino acid residue at position 325; a serine changed to a Group 2 amino acid residue at position 345; and a valine changed to a Group 2 amino acid residue other than valine at position 347.

[0033] In various embodiments the Escherichia coli aspartokinase polypeptide comprises at least one amino acid change chosen from: a glycine changed to an aspartate at position 323; a leucine changed to a phenylalanine at position 325; a serine changed to an isoleucine at position 345; and a valine changed to a methionine at position 347.

[0034] In various embodiments, the Corynebacterium glutamicum pyruvate carboxylase polypeptide or variant thereof comprises a proline changed to Group 4 amino acid residue at position 458. In various embodiments, the Corynebacterium glutamicum pyruvate carboxylase polypeptide or variant thereof comprises a proline changed to a serine at position 458.

[0035] In various embodiments, the Mycobacterium smegmatis pyruvate carboxylase polypeptide or variant thereof comprises a proline changed to Group 4 amino acid residue at position 448. In various embodiments, the Mycobacterium smegmatis pyruvate carboxylase polypeptide or variant thereof comprises a proline changed to a serine at position 448.

[0036] In various embodiments, the Streptomyces coelicolor pyruvate carboxylase polypeptide or variant thereof comprises a proline changed to Group 4 amino acid residue at position 449. In various embodiments, the Streptomyces coelicolor pyruvate carboxylase polypeptide or variant thereof comprises a proline changed to a serine at position 449.

[0037] The invention also features a coryneform bacterium or a bacterium of the family Enterobacteriaceae such as an Escherichia coli bacterium comprising a nucleic acid molecule that encodes a heterologous bacterial dihydrodipicolinate synthase or a functional variant thereof.

[0038] In various embodiments the heterologous bacterial dihydrodipicolinate synthase polypeptide or functional variant thereof is chosen from: a Mycobacterium smegmatis dihydrodipicolinate synthase polypeptide or a functional variant thereof; a Streptomyces coelicolor dihydrodipicolinate synthase polypeptide or a functional variant thereof; a Thermobifida fusca dihydrodipicolinate synthase polypeptide or a functional variant thereof; and an Erwinia chrysanthemi dihydrodipicolinate synthase polypeptide or a functional variant thereof. In certain embodiments, the heterologous bacterial dihydrodipicolinate synthase polypeptide or functional variant thereof with reduced feedback inhibition is an Escherichia coli dihydrodipicolinate synthase polypeptide or a functional variant thereof. In certain embodiments the heterologous bacterial dihydrodipicolinate synthase polypeptide or functional variant thereof has reduced feedback inhibition.

[0039] In various embodiments, the Mycobacterium smegmatis dihydrodipicolinate synthase polypeptide is at least 80% identical to SEQ ID NO:15 or SEQ ID NO:16 (e.g., a sequence at least 80%, 85%, 90%, 92%, 94%, 95%, 96%, 97%, 98%, 99% or more identical to SEQ ID NO: 15 or SEQ ID NO: 16); the Streptomyces coelicolor dihydrodipicolinate synthase polypeptide comprises SEQ ID NO: 17 or a variant sequence thereof; the Thermobifida fusca dihydrodipicolinate synthase polypeptide comprises SEQ ID NO: 14 or a variant sequence thereof; and the Erwinia chrysanthemi dihydrodipicolinate synthase polypeptide comprises SEQ ID NO: 18 or a variant sequence thereof.

[0040] In various embodiments the Erwinia chrysanthemi dihydrodipicolinate synthase polypeptide comprises at least one amino acid change chosen from: an asparagine changed to a Group 2 amino acid residue at position 80; a leucine changed to a Group 6 amino acid residue at position 88; and a histidine changed to a Group 6 amino acid residue at position 118.

[0041] In various embodiments the Erwinia chrysanthemi dihydrodipicolinate synthase polypeptide comprises at least one amino acid change chosen from: an asparagine changed to an isoleucine at position 80; a leucine changed to a phenylalanine at position 88; and a histidine changed to a tyrosine at position 118.

[0042] In various embodiments, the Streptomyces coelicolor dihydrodipicolinate synthase polypeptide comprises at least one amino acid change chosen from: an asparagine changed to a Group 2 amino acid residue at position 89; a leucine changed to a Group 6 amino acid residue at position 97; and a histidine changed to a Group 6 amino acid residue at position 127.

[0043] In various embodiments the Streptomyces coelicolor dihydrodipicolinate synthase polypeptide comprises at least one amino acid change chosen from: an asparagine changed to an isoleucine at position 89; a leucine changed to a phenylalanine at position 97; and a histidine changed to a tyrosine at position 127.

[0044] In various embodiments the Mycobacterium smegmatis dihydrodipicolinate synthase polypeptide comprises at least one amino acid change chosen from: an amino acid residue corresponding to tyrosine 90 of SEQ ID NO: 16 changed to a Group 2 amino acid residue; an amino acid residue corresponding to leucine 98 of SEQ ID NO: 16 changed to a Group 6 amino acid residue; and an amino acid residue corresponding to histidine 128 of SEQ ID NO:16 changed to a Group 6 amino acid residue.

[0045] In various embodiments the Mycobacterium smegmatis dihydrodipicolinate synthase polypeptide comprises at least one amino acid change chosen from: an amino acid residue corresponding to tyrosine 90 of SEQ ID NO:16 changed to an isoleucine; an amino acid residue corresponding to leucine 98 of SEQ ID NO: 16 changed to a phenylalanine; and an amino acid residue corresponding to histidine 128 of SEQ ID NO:16 changed to a histidine.

[0046] In various embodiments the Escherichia coli dihydrodipicolinate synthase polypeptide comprises at least one amino acid change chosen from: an asparagine changed to a Group 2 amino acid residue at position 80; an alanine changed to a Group 2 amino acid residue at position 81; a glutamatate changed to a Group 5 amino acid residue at position 84; a leucine changed to a Group 6 amino acid residue at position 88; and a histidine changed to a Group 6 amino acid at position 118.

[0047] In various embodiments the Escherichia coli dihydrodipicolinate synthase polypeptide comprises at least one amino acid change chosen from: an asparagine changed to an isoleucine at position 80; an alanine changed to a valine at position 81; a glutamate changed to a lysine at position 84; a leucine changed to a phenylalanine at position 88; and a histidine changed to a tyrosine at position 118. 378; and an alteration that truncates the homoserine dehydrogenase protein after the lysine amino acid residue at position 428. In one embodiment, the Corynebacterium glutamicum or Brevibacterium lactofermentum homoserine dehydrogenase polypeptide is encoded by the hom^{dr} sequence described in WO93/09225 SEQ ID NO. 3.

[0048] In various embodiments the Corynebacterium glutamicum or Brevibacterium lactofermentum homoserine dehydrogenase polypeptide comprises at least one amino acid change chosen from: a leucine changed to a phenylalanine at position 23; valine changed to an alanine at position 59; a valine changed to an isoleucine at position 104; and a glycine changed to a glutamic acid at position 378.

[0049] In various embodiments the Mycobacterium smegmatis homoserine dehydrogenase polypeptide comprises at least one amino acid change chosen from: a valine change to a Group 6 amino acid residue at position 10; a valine changed to a Group 1 amino acid residue at position 46; and a glycine changed to Group 3 amino acid residue at position 364.

[0050] In various embodiments the Mycobacterium smegmatis homoserine dehydrogenase polypeptide comprises at least one amino acid change chosen from: a valine changed to a phenylalanine at position 10; valine changed to an alanine at position 46; and a glycine changed to a glutamic acid at position 378.

[0051] In various embodiments the Streptomyces coelicolor homoserine dehydrogenase polypeptide comprises at least one amino acid change chosen from: a leucine change to a Group 6 amino acid residue at position 10; a valine changed to a Group 1 amino acid residue at position 46; a glycine changed to Group 3 amino acid residue at position 362; an alteration that truncates the homoserine dehydrogenase protein after the arginine amino acid residue at position 412In various embodiments the Streptomyces coelicolor homoserine dehydrogenase polypeptide comprises at least one amino acid change chosen from: a leucine changed to a phenylalanine at position 10; a valine changed to an alanine at position 46; and a glycine changed to a glutamic acid at position 362.

[0052] In various embodiments the Thermobifida fusca homoserine dehydrogenase polypeptide comprises at least one amino acid change chosen from: a leucine change to a Group 6 amino acid residue at position 192; a valine changed to a Group 1 amino acid residue at position 228; a glycine changed to Group 3 amino acid residue at position 545. In various embodiments, the Thermobifida fusca homoserine dehydrogenase polypeptide is truncated after the arginine amino acid residue at position 595.

[0053] In various embodiments the Thermobifida fusca homoserine dehydrogenase polypeptide comprises at least one amino acid change chosen from: a leucine changed to a phenylalanine at 5 position 192; valine changed to an alanine at position 228; and a glycine changed to a glutamic acid at position 545.

[0054] In various embodiments the Escherichia coli homoserine dehydrogenase polypeptidecomprises at least one amino acid change in SEQ ID NO:211 chosen from: a glycine changed to a Group 3 amino acid residue at position 330; and a serine changed to a Group 6 amino acid residue at position 352.

[0055] In various embodiments the Escherichia coli homoserine dehydrogenase polypeptide comprises at least one amino acid change in SEQ ID NO:211, ,chosen from: a glycine changed to an aspartate at position 330; and a serine changed to a phenylalanine at position 352.

[0056] The invention also features: a coryneform bacterium or a bacterium of the family Enterobacteriaceae such as an Escherichia coli bacterium comprising a nucleic acid that encodes a heterologous bacterial O-homoserine acetyltransferase polypeptide or a functional variant thereof.

[0057] In various embodiments the heterologous bacterial O-homoserine acetyltransferase polypeptide is chosen from: a Mycobacterium smegmatis O-homoserine acetyltransferase polypeptide or functional variant thereof; a Streptomyces coelicolor O-homoserine acetyltransferase polypeptide or a functional variant thereof; a Thermobifida fusca O-homoserine acetyltransferase polypeptide or a functional variant thereof; and an Erwinia chrysanthemi O-homoserine acetyltransferase polypeptide or a functional variant thereof. In certain embodiments, the heterologous bacterial O-homoserine acetyltransferase polypeptide is an O-homoserine acetyltransferase polypeptide from Corynebacterium glutamicum or a functional variant thereof. In certain embodiments the heterologous O-homoserine acetyltransferase polypeptide or functional variant thereof has reduced feedback inhibition. In various embodiments the Mycobacterium smegmatis O-homoserine acetyltransferase polypeptide is at least 80% identical to SEQ ID NO:22 or SEQ ID NO:23 (e.g., a sequence at least 80%, 85%, 30 90%, 92%, 94%, 95%, 96%, 97%, 98%, 99% or more identical to SEQ ID NO:22 or SEQ ID NO:23); the heterologous bacterial O-homoserine acetyltransferase polypeptide is a

[0058] The invention also features a coryneform bacterium or a bacterium of the family Enterobacteriaceae such as an Escherichia coli bacterium comprising a nucleic acid molecule that encodes a heterologous bacterial homoserine dehydrogenase or a functional variant thereof.

[0059] In various embodiments the heterologous bacterial homoserine dehydrogenase polypeptide is chosen from: (a) a Mycobacterium smegmatis homoserine dehydrogenase polypeptide or functional variant thereof; (b) a Streptomyces coelicolor homoserine dehydrogenase polypeptide or a functional variant thereof; (c) a Thermobifida fusca homoserine dehydrogenase polypeptide or a functional variant thereof; and (d) an Erwinia chrysanthemi homoserine dehydrogenase polypeptide or a functional variant thereof. In certain embodiments, the heterologous bacterial homoserine dehydrogenase polypeptide is a homoserine dehydrogenase polypeptide from a coryneform bacteria or a functional variant thereof (e.g., a Corynebacterium glutamicum homoserine dehydrogenase polypeptide or functional variant thereof, or a Brevibacterium lactofermentum homoserine dehydrogenase polypeptide or functional variant thereof). In certain embodiments, the heterologous homoserine dehydrogenase polypeptide or functional variant thereof is an Escherichia coli homoserine dehydrogenase polypeptide or a functional variant thereof. In certain embodiments the heterologous homoserine dehydrogenase polypeptide or functional variant thereof has reduced feedback inhibition.

[0060] In various embodiments the heterologous bacterial homoserine dehydrogenase polypeptide is a Streptomyces coelicolor homoserine dehydrogenase polypeptide or functional variant thereof with reduced feedback inhibition; the Streptomyces coelicolor homoserine dehydrogenase polypeptide comprises SEQ ID NO: 19 or a variant sequence thereof; the Thermobifida fusca homoserine dehydrogenase polypeptide comprises SEQ ID NO:21 or a variant sequence thereof; the Corynebacterium glutamicum and Brevibacterium lactofermentum homoserine dehydrogenases polypeptide comprise SEQ ID NO:209 or a variant sequence thereof; and the Escherichia coli homoserine dehydrogenase polypeptide comprises either SEQ ID NO:210, SEQ ID NO:21 1, or a variant sequence thereof

[0061] In various embodiments the Corynebacterium glutamicum or Brevibacterium lactofermentum homoserine dehydrogenase polypeptide comprises at least one amino acid change chosen from: a leucine change to a Group 6 amino acid residue at position 23; a valine changed to a Group 1 amino acid residue at position 59; a valine changed to another Group 2 amino acid residue at position 104; a glycine changed to Group 3 amino acid residue at position Thermobifida fusca O-homoserine acetyltransferase polypeptide or functional variant thereof; the Thermobifida fusca O-homoserine acetyltransferase polypeptide comprises SEQ ID NO:24 or a variant sequence thereof; the heterologous bacterial O-homoserine acetyltransferase polypeptide is a Corynebacterium glutamicum O-homoserine acetyltransferase polypeptide or functional variant thereof; the C. glutamicum O-homoserine acetyltransferase polypeptide comprises SEQ ID NO:212 or a variant sequence thereof; or the heterologous bacterial O-homoserine acetyltransferase polypeptide is a Escherichia coli O-homoserine acetyltransferase polypeptide or functional variant thereof; the Escherichia coli O-homoserine acetyltransferase polypeptide comprises SEQ ID NO:213 or a variant sequence thereof.

[0062] The invention also features a coryneform bacterium or a bacterium of the family Enterobacteriaceae such as an Escherichia coli bacterium comprising a nucleic acid molecule that encodes a heterologous bacterial O-acetylhomoserine sulfhydrylase or a functional variant thereof.

[0063] In various embodiments the heterologous bacterial O-acetylhomoserine sulfhydrylase polypeptide is chosen from: (a) a Mycobacterium smegmatis O-acetylhomoserine sulfhydrylase polypeptide or functional variant thereof; (b) a Streptomyces coelicolor O-acetylhomoserine sulfhydrylase polypeptide or a functional variant thereof; and (c) a Thermobifida fusca O-acetylhomoserine sulfhydrylase polypeptide or a functional variant thereof. In certain embodiments, the heterologous bacterial O-acetylhomoserine sulffiydrylase polypeptide is an O-acetylhomoserine sulfhydrylase polypeptide from Corynebacterium glutamicum or a functional variant thereof. In certain embodiments the heterologous O-acetylhomoserine sulfhydrylase polypeptide or functional variant thereof has reduced feedback inhibition.

[0064] In various embodiments the Mycobacterium smegmatis O-acetylhomoserine sulfhydrylase polypeptide is at least 80% identical to SEQ ID NO:26 (e.g., a sequence at least 80%, 85%, 90%, 92%, 94%, 95%, 96%, 97%, 98%, 99% or more identical to SEQ ID NO:26); the Thermobifida fusca O-acetylhomoserine sulfhydrylase polypeptide comprises SEQ ID NO:25 or a variant sequence thereof; and the Corynebacterium glutamicum heterologous bacterial O-acetylhomoserine sulfhydrylase polypeptide comprises SEQ ID NO:214 or a variant sequence thereof.

[0065] The invention also features a coryneform bacterium or a bacterium of the family Enterobacteriaceae such as an Escherichia coli bacterium comprising a nucleic acid molecule that encodes a heterologous bacterial methionine adenosyltransferase or a functional variant thereof.

[0066] In various embodiments the heterologous bacterial methionine adenosyltransferase polypeptide is chosen from: a Mycobacterium smegmatis methionine adenosyltransferase polypeptide or functional variant thereof; a Streptomyces coelicolor methionine adenosyltransferase polypeptide or a functional variant thereof; a Thermobifida fusca methionine adenosyltransferase polypeptide or a functional variant thereof; and an Erwinia chrysanthemi methionine adenosyltransferase polypeptide or a functional variant thereof. In certain embodiments, the heterologous bacterial methionine adenosyltransferase polypeptide is a methionine adenosyltransferase polypeptide from Corynebacterium glutamicum or a functional variant thereof. In certain embodiments, the heterologous bacterial methionine adenosyltransferase polypeptide is a methionine adenosyltransferase polypeptide from Escherichia coli or a functional variant thereof. In certain embodiments the heterologous methionine adenosyltransferase polypeptide or functional variant thereof has reduced feedback inhibition In various embodiments the Mycobacterium smegmatis O-methionine adenosyltransferase polypeptide is at least 80% identical to SEQ ID NO:27 or SEQ ID NO:28 (e.g., a sequence at least 80%, 85%, 90%, 92%, 94%, 95%, 96%, 97%, 98%, 99% or more identical to SEQ ID NO:27 or SEQ ID NO:28); the Streptomyces coelicolor methionine adenosyltransferase polypeptide comprises SEQ ID NO:30 or a variant sequence thereof; the heterologous bacterial methionine adenosyltransferase polypeptide is a Thermobifida fusca methionine adenosyltransferase or functional variant thereof; the Thermobifida fusca methionine adenosyltransferase polypeptide comprises SEQ ID NO:29 or a variant sequence thereof; the Corynebacterium glutamicum heterologous bacterial methionine adenosyltransferase comprises SEQ ID NO:215 or a variant sequence thereof; and the Escherichia coli heterologous bacterial methionine adenosyltransferase polypeptide comprises SEQ ID NO:216 or a variant sequence thereof.

[0067] In various embodiments the bacterium further comprises a nucleic acid molecule encoding a heterologous bacterial dihydrodipicolinate synthase polypeptide or a functional variant thereof.

[0068] In various embodiments the heterologous bacterial dihydrodipicolinate synthase polypeptide or a functional variant thereof is chosen from: a Mycobacterium smegmatis dihydrodipicolinate synthase polypeptide or a functional variant thereof; a Streptomyces coelicolor dihydrodipicolinate synthase polypeptide or a functional variant thereof; a Thermobifida fusca dihydrodipicolinate synthase polypeptide or a functional variant thereof; an Erwinia chrysanthemi dihydrodipicolinate synthase polypeptide or a functional variant thereof; an Escherichia coli dihydrodipicolinate synthase polypeptide or a functional variant thereof; and a Corynebacterium glutamicum dihydrodipicolinate synthase polypeptide or a functional variant thereof. In certain embodiments the heterologous dihydrodipicolinate synthase polypeptide or functional variant thereof has reduced feedback inhibition.

[0069] In various embodiments the bacterium further comprises at least one of: (a) a nucleic acid molecule encoding a heterologous bacterial homoserine dehydrogenase polypeptide or a functional variant thereof; (b) a nucleic acid molecule encoding a heterologous bacterial O-homoserine acetyltransferase polypeptide or a functional variant thereof; (c) a nucleic acid molecule encoding a heterologous O-acetylhomoserine sulfhydrylase polypeptide or a functional variant thereof. In certain embodiments one or more of the heterologous polypeptides or functional variants thereof has reduced feedback inhibition.

[0070] In various embodiments the heterologous bacterial homoserine dehydrogenase polypeptide is chosen from: a Mycobacterium smegmatis homoserine dehydrogenase polypeptide or functional variant thereof; a Streptomyces coelicolor homoserine dehydrogenase polypeptide or a functional variant thereof; a Thermobifida fusca homoserine dehydrogenase polypeptide or a functional variant thereof; an Escherichia coli homoserine dehydrogenase polypeptide or a functional variant thereof; a Corynebacterium glutamicum homoserine dehydrogenase polypeptide or a functional variant thereof; and an Erwinia chrysanthemi homoserine dehydrogenase polypeptide or a functional variant thereof. In certain embodiments the heterologous homoserine dehydrogenase polypeptide or functional variant thereof has reduced feedback inhibition.

[0071] In various embodiments the heterologous bacterial O-homoserine acetyltransferase polypeptide is chosen from: a Mycobacterium smegmatis O-homoserine acetyltransferase polypeptide or functional variant thereof; a Streptomyces coelicolor O-homoserine acetyltransferase polypeptide or a functional variant thereof; a Thermobifida fusca O-homoserine acetyltransferase polypeptide or a functional variant thereof; an Erwinia chrysanthemi O-homoserine acetyltransferase polypeptide or a functional variant thereof; an Escherichia coli O-homoserine acetyltransferase polypeptide or a functional variant thereof; and a Corynebacterium glutamicum O-homoserine acetyltransferase polypeptide or a functional variant thereof. In certain embodiments the heterologous O-homoserine acetyltransferase polypeptide or functional variant thereof has reduced feedback inhibition.

[0072] In various embodiments the heterologous bacterial O-acetylhomoserine sulfhydrylase polypeptide is chosen from: a Mycobacterium smegmatis O-acetylhomoserine sulfhydrylase or functional variant thereof; a Streptomyces coelicolor O-acetylhomoserine sulhydrylase polypeptide or a functional variant thereof; a Thermobifida fusca O-acetylhomoserine sulfhydrylase polypeptide or a functional variant thereof; and a Corynebacterium glutamicum O-acetylhomoserine sulfhydrylase polypeptide or a functional variant thereof. In certain embodiments the heterologous O-acetylhomoserine sulfhydrylase polypeptide or functional variant thereof has reduced feedback inhibition.

[0073] In various embodiments the bacterium further comprises a nucleic acid molecule encoding a heterologous bacterial methionine adenosyltransferase polypeptide (e.g., a Mycobacterium smegmatis methionine adenosyltransferase polypeptide or functional variant thereof; a Streptomyces coelicolor methionine adenosyltransferase polypeptide or a functional variant thereof; a Thermobifida fusca methionine adenosyltransferase polypeptide or a functional variant thereof; an Erwinia chrysanthemi methionine adenosyltransferase polypeptide or a functional variant thereof; an Escherichia coli methionine adenosyltransferase polypeptide or a functional variant thereof; or a Corynebacterium glutamicum methionine adenosyltransferase polypeptide or a functional variant thereof).

[0074] The invention features a coryneform bacterium or a bacterium of the family Enterobacteriaceae such as an Escherichia coli bacterium comprising at least two of: (a) a nucleic acid molecule encoding a heterologous bacterial homoserine dehydrogenase polypeptide or a functional variant thereof; (b) a nucleic acid molecule encoding a heterologous bacterial O-homoserine acetyltransferase polypeptide or a functional variant thereof; and (c) a nucleic acid molecule encoding a heterologous bacterial O-acetylhomoserine sulfhydrylase polypeptide or a functional variant thereof. In certain embodiments one or more of the heterologous bacterial polypetides or functional variants thereof has reduced feedback inhibition

[0075] In another aspect, the invention features an Escherichia coli or coryneform bacterium comprising at least one or two of: (a) a genetically altered nucleic acid molecule comprising a sequence encoding a bacterial aspartokinase polypeptide or a functional variant thereof; (b) a genetically altered nucleic acid molecule comprising a sequence encoding a bacterial aspartate semialdehyde dehydrogenase polypeptide or a functional variant thereof; (c) a genetically altered nucleic acid molecule comprising a sequence encoding a bacterial phosphoenolpyruvate carboxylase polypeptide or a functional variant thereof; and (d) a genetically altered nucleic acid molecule comprising a sequence encoding a bacterial dihydrodipicolinate synthase polypeptide or a functional variant thereof. In various embodiments, the genetically altered nucleic acid molecule is a genomic nucleic acid molecule (e.g., a genomic nucleic acid molecule in which a mutation has been introduced, e.g., into a coding or regulatory region of a gene). In various embodiments, the nucleic acid molecule is a recombinant nucleic acid molecule.

[0076] In various embodiments, at least one of the at least two genetically altered nucleic acid molecules encodes a heterologous polypeptide. In one embodiment, the bacterium comprises (a) and (b), (a) and (c), (a) and (d), (b) and (c), (b) and (d), or (c) and (d). In one embodiment,the bacterium comprises at least three of (a)-(e). In one embodiment, the bacterium has reduced activity of one or more of the following polypeptides, relative to a control: (a) a homoserine dehydrogenase polypeptide; (b) a homoserine kinase polypeptide; and (c) a phosphoenolpyruvate carboxykinase polypeptide. In one embodiment, the bacterium comprises a mutation in an endogenous hom gene or an endogenous thrB gene (e.g., a mutation that reduces activity of the polypeptide encoded by the gene (e.g., a mutation in a catalytic region) or a mutation that reduces expression of the polypeptide encoded by the gene (e.g., the mutation causes premature termination of the polypeptide), or a mutation which decreases transcript or protein stability or half life. In one embodiment, the bacterium comprises a mutation in an endogenous hom gene and an endogeous thrB gene. In one embodiment,the bacterium comprises a mutation in an endogenous pck gene.

[0077] In another aspect, the invention features an Escherichia coli or coryneform bacterium comprising at least one or two of: (a) a genetically altered nucleic acid molecule comprising a sequence encoding a bacterial phosphoenolpyruvate carboxylase polypeptide or a functional variant thereof; (b) a genetically altered nucleic acid molecule comprising a sequence encoding a bacterial aspartokinase polypeptide or a functional variant thereof: (c) a genetically altered nucleic acid molecule comprising a sequence encoding a bacterial aspartate semialdehyde dehydrogenase polypeptide or a functional variant thereof; (d) a genetically altered nucleic acid molecule comprising a sequence encoding a bacterial homoserine dehydrogenase polypeptide or a functional variant thereof; (e) a genetically altered nucleic acid molecule comprising a sequence encoding a bacterial homoserine O-acetyltransferase polypeptide or a functional variant thereof; (f) a genetically altered nucleic acid molecule comprising a sequence encoding a bacterial O-acetylhomoserine sulfhydrylase polypeptide or a functional variant thereof; (g) a genetically altered nucleic acid molecule comprising a sequence encoding a bacterial 5-methyltetrahydrofolate homocysteine methyltransferase polypeptide or a functional variant thereof; (h) a genetically altered nucleic acid molecule comprising a sequence encoding a bacterial O-succinylhomoserine (thio)-lyase polypeptide or a functional variant thereof; (i) a genetically altered nucleic acid molecule comprising a sequence encoding a bacterial 5-methyltetrahydropteroyltriglutamate-homocysteine methyltransferase polypeptide or a functional variant thereof; (j) a genetically altered nucleic acid molecule comprising a sequence encoding a bacterial methionine adenosyltransferase polypeptide or a functional variant thereof; (k) a genetically altered nucleic acid molecule comprising a sequence encoding a bacterial serine hydroxylmethyltransferase polypeptide or a functional variant thereof; and (l) a genetically altered nucleic acid molecule comprising a sequence encoding a bacterial cystathionine beta-lyase polypeptide or a functional variant thereof.

[0078] In various embodiments, at least one of the at least two genetically altered nucleic acid molecules encodes a heterologous polypeptide. In various embodiments, the bacterium comprises (a) and at least one of (b), (c), (d), (e), (f), (g), (h), (i), (j), (k), and (1). In various embodiments, the bacterium comprises (b) and at least one of (c), (d), (e), (f), (g), (h), (i), (j), (k), and (1). In various embodiments, the bacterium comprises (c) and at least one of (d), (e), (f), (g), (h), (i), (j), (k), and (1). In various embodiments, the bacterium comprises (d) and at least one of (e), (f), (g), (h), (i), (j), (k), and (1). In various embodiments, the bacterium comprises (e) and at least one of (f), (g), (h), (i), (j), (k), and (l). In various embodiments, the bacterium comprises (f) and at least one of (g), (h), (i), (j), (k), and (l). In various embodiments, the bacterium comprises (g) and at least one of (h), (i), (j), (k), and (l). In various embodiments, the bacterium comprises (h) and at least one of (i), (j), (k), and (l). In various embodiments, the bacterium comprises (i) and at least one of (j) (k), and (l). In various embodiments, the bacterium comprises (j) and at least one of (k), and (l). In various embodiments, the bacterium comprises (k) and (l). In various embodiments,the bacterium comprises at least three of (a)-(l).

[0079] In some embodiments, the bacterium has reduced activity of one or more of the following polypeptides, relative to a control: (a) a homoserine kinase polypeptide; (b) a phosphoenolpyruvate carboxykinase polypeptide; (c) a homoserine dehydrogenase polypeptide; and (d) a mcbR gene product polypeptide, e.g., the bacterium comprises a mutation in an endogenous hom gene, an endogenous thrB gene, an endogenous pck gene, or an endogenous mcbR gene, or combinations thereof.

[0080] In another aspect, the invention features an Escherichia coli or coryneform bacterium comprising at least two of: (a) a genetically altered nucleic acid molecule comprising a sequence encoding a bacterial phosphoenolpyruvate carboxylase polypeptide or a functional variant thereof; (b) a genetically altered nucleic acid molecule comprising a sequence encoding a bacterial aspartokinase polypeptide or a functional variant thereof; (c) a genetically altered nucleic acid molecule comprising a sequence encoding a bacterial aspartate semialdehyde dehydrogenase polypeptide or a functional variant thereof (d) a genetically altered nucleic acid molecule comprising a sequence encoding a bacterial homoserine dehydrogenase polypeptide or a functional variant thereof.

[0081] In various embodiments, at least one of the at least two polypeptides encodes a heterologous polypeptide.

[0082] In various embodiments, the bacterium comprises (a) and (b), (a) and (c), (a) and (d), (b) and (c), (b) and (d), or (c) and (d); or the bacterium comprises at least three of (a)-(d).

[0083] In various embodiments, the bacterium has reduced activity of one or more of the following polypeptides, relative to a control: (a) a phosphoenolpyruvate carboxykinase polypeptide; and (b) a mcbR gene product polypeptide, e.g., the bacterium comprises a mutation in an endogenous pck gene or an endogenous mcbR gene, e.g.,the bacterium comprises a mutation in an endogenous pck gene and an endogenous mcbR gene.

[0084] The invention also features a method of producing an amino acid or a related metabolite, the method comprising: cultivating a bacterium (e.g., a bacterium described herein) according to under conditions that allow the amino acid the metabolite to be produced, and collecting a composition that comprises the amino acid or related metabolite from the culture. The method can further include fractionating at least a portion of the culture to obtain a fraction enriched in the amino acid or the metabolite.

[0085] The invention also features a method for producing L-lysine, the method comprising: cultivating a bacterium described herein under conditions that allow L-lysine to be produced, and collecting the culture. The culture can be fractionated (e.g., to remove cells and/or to obtain fractions enriched in L-lysine).

[0086] In another aspect, the invention features a method for the preparation of animal feed additives comprising an aspartate-derived amino acid(s), the method comprising two or more of the following steps:
[0087] (a) cultivating a bacterium (e.g., a bacterium described herein) under conditions that allow the aspartate-derived amino acid(s) to be produced;
[0088] (b) collecting a composition that comprises at least a portion of the aspartate-derived amino acid(s);
[0089] (c) concentrating of the collected composition to enrich for the aspartate-derived amino acid(s); and
[0090] (d) optionally, adding of one or more substances to obtain the desired animal feed additive.

[0091] The substances that can be added include, e.g., conventional organic or inorganic auxiliary substances or carriers, such as gelatin, cellulose derivatives (e.g., cellulose ethers), silicas, silicates, stearates, grits, brans, meals, starches, gums, alginates sugars or others, and/or mixed and stabilized with conventional thickeners or binders.

[0092] In various embodiments, the composition that is collected lacks bacterial cells. In various embodiments, the composition that is collected contains less than 10%, 5%, 1%, 0.5% of the bacterial cells that result from cultivating the bacterium. In various embodiments, the composition comprises at least 1% (e.g., at least 1%, 5%, 10%, 20%, 40%, 50%, 75%, 80%, 90%, 95%, or to 100%) of that bacterial cells that result from cultivating the bacterium.

[0093] The invention features a method for producing L-methionine, the method comprising: cultivating a bacterium described herein under conditions that allow L-methionine to be produced, and collecting the culture. The culture can be fractionated (e.g., to remove cells and/or to obtain fractions enriched in L-methionine).

[0094] The invention features a method for producing S-adenosyl-L-methionine (S-AM), the method comprising: cultivating a bacterium described herein under conditions that allow S-adenosyl-L-methionine to be produced, and collecting the culture. The culture can be fractionated (e.g., to remove cells and/or to obtain fractions enriched in S-AM). The invention features a method for producing L-threonine or L-isoleucine, the method comprising: cultivating a bacterium described herein under conditions that allow L-threonine or L-isoleucine to be produced, and collecting the culture. The culture can be fractionated (e.g., to remove cells and/or to obtain fractions enriched in L-threonine or L-isoleucine). The invention also features methods for producing homoserine, O-acetylhomoserine, and derivatives thereof, the method comprising: cultivating a bacterium described herein under conditions that allow homoserine, O-acetylhomoserine, or derivatives thereof to be produced, and collecting the culture. The culture can be fractionated (e.g., to remove cells and/or to obtain fractions enriched in homoserine, O-acetylhomoserine, or derivatives thereof).

[0095] The invention features a coryneform bacterium or a bacterium of the family Enterobacteriaceae such as an Escherichia coli bacterium comprising a nucleic acid molecule that encodes a heterologous bacterial cystathionine beta-lyase polypeptide (e.g., a Mycobacterium smegmatis cystathionine beta-lyase polypeptide or functional variant thereof; a Bifidobacterium longum cystathionine beta-lyase polypeptide or a functional variant thereof; a Lactobacillus plantarum cystathionine beta-lyase polypeptide or a functional variant thereof; a Corynebacterium glutamicum cystathionine beta-lyase polypeptide or a functional variant thereof; an Escherichia coli cystathionine beta-lyase polypeptide or a functional variant thereof) or a functional variant thereof.

[0096] In various embodiments the Mycobacterium smegmatis cystathionine beta-lyase polypeptide comprises a sequence at least 80% identical to SEQ ID NO:59 (e.g., a sequence at 25 least 80%, 85%, 90%, 92%, 94%, 95%, 96%, 97%, 98%, 99% or more identical to SEQ ID NO:59), or a variant sequence thereof; the Bifidobacterium longum cystathionine beta-lyase polypeptide comprises SEQ ID NO:60 or a variant sequence thereof; the Lactobacillus plantarum cystathionine beta-lyase polypeptide comprises SEQ ID NO:61 or a variant sequence thereof; the Corynebacterium glutamicum cystathionine beta-lyase polypeptide comprises SEQ ID NO:217 or a variant sequence thereof; and the Escherichia coli cystathionine beta-lyase polypeptide comprises SEQ ID NO:218 or a variant sequence thereof.

[0097] The invention features a coryneform bacterium or a bacterium of the family Enterobacteriaceae such as an Escherichia coli bacterium comprising a nucleic acid molecule that encodes a heterologous bacterial glutamate dehydrogenase polypeptide (e.g., a Streptomyces coelicolor glutamate dehydrogenase or functional variant thereof; a Thermobifida fusca glutamate dehydrogenase polypeptide or a functional variant thereof; a Lactobacillus plantarum glutamate dehydrogenase polypeptide or a functional variant thereof; a Corynebacterium glutamicum glutamate dehydrogenase polypeptide or a functional variant thereof; a Escherichia coli glutamate dehydrogenase polypeptide or a functional variant thereof) or a functional variant thereof.

[0098] In various embodiments the Mycobacterium smegmatis glutamate dehydrogenase polypeptide comprises SEQ ID NO:62 or a variant sequence thereof; the Thermobifida fusca glutamate dehydrogenase polypeptide comprises SEQ ID NO:63 or a variant sequence thereof; the Lactobacillus plantarum glutamate dehydrogenase polypeptide comprises SEQ ID NO:65 or a variant sequence thereof; the Corynebacterium glutamicum glutamate dehydrogenase polypeptide comprises SEQ ID NO:219 or a variant sequence thereof; and the Escherichia coli glutamate dehydrogenase polypeptide comprises SEQ ID NO:220 or a variant sequence thereof.

[0099] The invention also features a coryneform bacterium or a bacterium of the family Enterobacteriaceae such as an Escherichia coli bacterium comprising a nucleic acid molecule that encodes a heterologous bacterial diaminopimelate dehydrogenase polypeptide or a functional variant thereof (e.g., a Bacillus sphaericus diaminopimelate dehydrogenase polypeptide or a functional variant thereof; a Corynebacterium glutamicum glutamate dehydrogenase polypeptide or a functional variant thereof).

[0100] In various embodiments the Bacillus sphaericus diaminopimelate dehydrogenase polypeptide comprises SEQ ID NO:65 or a variant sequence thereof.

[0101] The invention also features a coryneform bacterium or a bacterium of the family Enterobacteriaceae such as an Escherichia coli bacterium comprising a nucleic acid molecule that encodes a heterologous bacterial detergent sensitivity rescuer polypeptide (e.g., a Mycobacterium smegmatis detergent sensitivity rescuer polypeptide or functional variant thereof; a Streptomyces coelicolor detergent sensitivity rescuer polypeptide or a functional variant thereof; a Thermobifida fusca detergent sensitivity rescuer polypeptide or a functional variant thereof; a Corynebacterium glutamicum detergent sensitivity rescuer polypeptide or a functional variant thereof) or a functional variant thereof.

[0102] In various embodiments the Mycobacterium smegmatis detergent sensitivity rescuer polypeptide comprises a sequence at least 80% identical to either SEQ ID NO:68, SEQ ID NO:69 (e.g., a sequence at least 80%, 85%, 90%, 92%, 94%, 95%, 96%, 97%, 98more identical), or a variant sequence thereof; the heterologous bacterial detergent sensitivity rescuer polypeptide is a Streptomyces coelicolor detergent sensitivity rescuer polypeptide or functional variant thereof; the Streptomyces coelicolor detergent sensitivity rescuer polypeptide comprises SEQ ID NO:67 or a variant sequence thereof; the Thermobifida fusca detergent sensitivity rescuer polypeptide comprises SEQ ID NO:66 or a variant sequence thereof; and the Corynebacterium glutamicum detergent sensitivity rescuer polypeptide comprises SEQ ID NO:221 or a variant sequence thereof.The invention features a coryneform bacterium or a bacterium of the family Enterobacteriaceae such as an Escherichia coli bacterium comprising a nucleic acid molecule that encodes a heterologous bacterial 5-methyltetrahydrofolate homocysteine methyltransferase polypeptide (e.g., a Mycobacterium smegmatis 5-methyltetrahydrofolate homocysteine methyltransferase polypeptide or functional variant thereof; a Streptomyces coelicolor 5-methyltetrahydrofolate homocysteine methyltransferase polypeptide or a functional variant thereof; a Thermobifida fusca 5-methyltetrahydrofolate homocysteine methyltransferase polypeptide or a functional variant thereof; a Lactobacillus plantarum 5-methyltetrahydrofolate homocysteine methyltransferase polypeptide or a functional variant thereof; a Corynebacterium glutamicum 5-methyltetrahydrofolate homocysteine methyltransferase polypeptide or a functional variant thereof; a Escherichia coli 5-methyltetrahydrofolate homocysteine methyltransferase polypeptide or a functional variant thereof) or a functional variant thereof.

[0103] In various embodiments the Mycobacterium smegmatis 5-methyltetrahydrofolate homocysteine methyltransferase polypeptide comprises a sequence at least 80% identical to SEQ ID NO:72, SEQ ID NO:73 (e.g., a sequence at least 80%, 85%, 90%, 92%, 94%, 95%, 96%, 97%, 98%, 99% or more identical), or a variant sequence thereof; the Streptomyces coelicolor 5-methyltetrahydrofolate homocysteine methyltransferase polypeptide comprises SEQ ID NO:71 or a variant sequence thereof; the Thermobifida fusca 5-methyltetrahydrofolate homocysteine methyltransferase polypeptide comprises SEQ ID NO:70 or a variant sequence thereof; the Lactobacillus plantarum 5 -methyltetrahydrofolate homocysteine methyltransferase polypeptide comprises SEQ ID NO:74 or a variant sequence thereof; the Corynebacterium glutamicum 5-methyltetrahydrofolate homocysteine methyltransferase polypeptide comprises SEQ ID NO: 222 or a variant sequence thereof; and the Escherichia coli 5-methyltetrahydrofolate homocysteine methyltransferase polypeptide comprises SEQ ID NO:223 or a variant sequence thereof The invention also features a coryneform bacterium or a bacterium of the family Enterobacteriaceae such as an Escherichia coli bacterium comprising a nucleic acid molecule that encodes a heterologous bacterial 5-methyltetrahydropteroyltriglutamate-homocysteine methyltransferase polypeptide (e.g., a Mycobacterium smegmatis 5-methyltetrahydropteroyltriglutamate-homocysteine methyltransferase polypeptide or functional variant thereof; a Streptomyces coelicolor 5-methyltetrahydropteroyltriglutamate-homocysteine methyltransferase polypeptide or functional variant thereof; a Corynebacterium glutamicum 5-methyltetrahydropteroyltriglutamate-homocysteine methyltransferase polypeptide or a functional variant thereof; an Escherichia coli 5-methyltetrahydropteroyltriglutamate-homocysteine methyltransferase polypeptide or a functional variant thereof) or a functional variant thereof.

[0104] In various embodiments the Mycobacterium smegmatis 5-methyltetrahydropteroyltriglutamate-homocysteine methyltransferase polypeptide is at least 80% identical to SEQ ID NO:75 or SEQ ID NO:76 (e.g., a sequence at least 80%, 85%, 90%, 92%, 94%, 95%, 96%, 97%, 98%, 99% or more identical to SEQ ID NO:75 or SEQ ID NO:76); the Streptomyces coelicolor 5-methyltetrahydropteroyltriglutamate-homocysteine methyltransferase polypeptide comprises SEQ ID NO:77 or a variant sequence thereof; the Corynebacterium glutamicum 5-methyltetrahydropteroyltriglutamate-homocysteine methyltransferase polypeptide comprises SEQ ID NO:224 or a variant sequence thereof; and the Escherichia coli 5-methyltetrahydropteroyltriglutamate-homocysteine methyltransferase polypeptide comprises SEQ ID NO:225 or a variant sequence thereof.

[0105] The invention features a coryneform bacterium or a bacterium of the family Enterobacteriaceae such as an Escherichia coli bacterium comprising a nucleic acid molecule that encodes a heterologous bacterial serine hydroxymethyltransferas polypeptide (e.g., a Mycobacterium smegmatis serine hydroxymethyltransferase polypeptide or functional variant thereof; a Streptomyces coelicolor serine hydroxymethyltransferase polypeptide or a functional variant thereof; a Thermobifida fusca serine hydroxymethyltransferase polypeptide or a functional variant thereof; a Lactobacillus plantarum serine hydroxymethyltransferase polypeptide or a functional variant thereof; a Corynebacterium glutamicum serine hydroxymethyltransferase polypeptide or a functional variant thereof; an Escherichia coli serine hydroxymethyltransferase polypeptide or a functional variant thereof) or a functional variant thereof.

[0106] In various embodiments the Mycobacterium smegmatis serine hydroxymethyltransferase polypeptide is at least 80% identical to SEQ ID NO:80 or SEQ ID NO:81 (e.g., a sequence at least 80%, 85%, 90%, 92%, 94%, 95%, 96%, 97%, 98%, 99% or more identical to SEQ ID NO:80 or SEQ ID NO:81); the Streptomyces coelicolor serine hydroxymethyltransferase polypeptide comprises SEQ ID NO:78 or a variant sequence thereof; the Thermobifida fusca serine hydroxymethyltransferase polypeptide comprises SEQ ID NO:79 or a variant sequence thereof; the Lactobacillus plantarum serine hydroxymethyltransferase polypeptide comprises SEQ ID NO:82 or a variant sequence thereof; the Corynebacterium glutamicum serine hydroxymethyltransferase polypeptide comprises SEQ ID NO:226 or a variant sequence thereof; and the Escherichia coli serine hydroxymethyltransferase polypeptide comprises SEQ ID NO:227 or a variant sequence thereof.

[0107] The invention features a coryneform bacterium or a bacterium of the family Enterobacteriaceae such as an Escherichia coli bacterium comprising a nucleic acid molecule that encodes a heterologous bacterial 5,10-methylenetetrahydrofolate reductase polypeptide (e.g., a Streptomyces coelicolor 5,1 0-methylenetetrahydrofolate reductase polypeptide or a functional variant thereof; a Thermobifida fusca 5,10-methylenetetrahydrofolate reductase polypeptide or a functional variant thereof; a Corynebacterium glutamicum 5,1 0-methylenetetrahydrofolate reductase polypeptide or a functional variant thereof; an Escherichia coli 5,10-methylenetetrahydrofolate reductase polypeptide or a functional variant thereof) or a functional variant thereof.

[0108] In various embodiments the Streptomyces coelicolor 5,1 0-methylenetetrahydrofolate reductase polypeptide comprises SEQ ID NO:84 or a variant sequence thereof; the Thermobifida fusca 5,10-methylenetetrahydrofolate reductase polypeptide comprises SEQ ID NO: 83 or a variant sequence thereof; the Corynebacterium glutamicum 5,10-methylenetetrahydrofolate reductase polypeptide comprises SEQ ID NO: 228 or a variant sequence thereof; and the Escherichia coli 5,10-methylenetetrahydrofolate reductase polypeptide comprises SEQ ID NO: 229 or a variant sequence thereof.

[0109] The invention features a coryneform bacterium or a bacterium of the family Enterobacteriaceae such as an Escherichia coli bacterium comprising a nucleic acid molecule that encodes a heterologous bacterial serine O-acetyltransferase polypeptide (e.g., a Mycobacterium smegmatis serine O-acetyltransferase polypeptide or functional variant thereof; a Lactobacillus plantarum serine O-acetyltransferase polypeptide or a functional variant thereof; a Corynebacterium glutamicum serine O-acetyltransferase polypeptide or a functional variant thereof; an Escherichia coli serine O-acetyltransferase polypeptide or a functional variant thereof) or a functional variant thereof.

[0110] In various embodiments the Mycobacterium smegmatis serine O-acetyltransferase polypeptide is at least 80% identical to SEQ ID NO:85 or SEQ ID NO:86 (e.g., a sequence at least 80%, 85%, 90%, 92%, 94%, 95%, 96%, 97%, 98%, 99% or more identical to SEQ ID NO:85 or SEQ ID NO:86); the Lactobacillus plantarum serine O-acetyltransferase polypeptide comprises SEQ ID NO:87 or a variant sequence thereof; the Corynebacterium glutamicum serine O-acetyltransferase polypeptide comprises SEQ ID NO:230 or a variant sequence thereof; and the Escherichia coli serine O-acetyltransferase polypeptide comprises SEQ ID NO:231 or a variant sequence thereof.

[0111] The invention features a coryneform bacterium or a bacterium of the family Enterobacteriaceae such as an Escherichia coli bacterium comprising a nucleic acid molecule that encodes a heterologous bacterial D-3-phosphoglycerate dehydrogenase polypeptide (e.g., a Mycobacterium smegmatis D-3-phosphoglycerate dehydrogenase polypeptide or functional variant thereof; a Streptomyces coelicolor D-3-phosphoglycerate dehydrogenase polypeptide or a functional variant thereof; a Thermobifida fusca D-3-phosphoglycerate dehydrogenase polypeptide or a functional variant thereof; a Lactobacillus plantarum D-3-phosphoglycerate dehydrogenase polypeptide or a functional variant thereof; a Corynebacterium glutamicum D-3-phosphoglycerate dehydrogenase polypeptide or a functional variant thereof; an Escherichia coli D-3-phosphoglycerate dehydrogenase polypeptide or a functional vaant thereof) or a functional variant thereof.

[0112] In various embodiments the Mycobacterium smegmatis D-3-phosphoglycerate dehydrogenase polypeptide is at least 80% identical to SEQ ID NO:88 or SEQ ID NO:89 (e.g., a sequence at least 80%, 85%, 90%, 92%, 94%, 95%, 96%, 97%, 98%, 99% or more identical to SEQ ID NO:88 or SEQ ID NO:89); the Streptomyces coelicolor D-3-phosphoglycerate dehydrogenase polypeptide comprises SEQ ID NO:91 or a variant sequence thereof; the Thermobifida fusca D-3-phosphoglycerate dehydrogenase polypeptide comprises SEQ ID NO:90 or a variant sequence thereof; the Lactobacillus plantarum D-3-phosphoglycerate dehydrogenase polypeptide comprises SEQ ID NO:92 or a variant sequence thereof; the Corynebacterium glutamicum serine O-acetyltransferase polypeptide comprises SEQ ID NO:232 or a variant sequence thereof; and the Escherichia coli serine O-acetyltransferase polypeptide comprises SEQ ID NO:233 or a variant sequence thereof.

[0113] The invention features a coryneform bacterium or a bacterium of the family Enterobacteriaceae such as an Escherichia coli bacterium comprising a nucleic acid molecule that encodes a heterologous bacterial lysine exporter polypeptide (e.g., a Corynebacterium glutamicum lysine exporter polypeptide or functional variant thereof; a Mycobacterium smegmatis lysine exporter polypeptide or functional variant thereof; a Streptomyces coelicolor lysine exporter polypeptide or a functional variant thereof; an Escherichia coli lysine exporter polypeptide or functional variant thereof or a Lactobacillus plantarum lysine exporter protein or a functional variant thereof) or functional variant thereof.

[0114] In various embodiments the Mycobacterium smegmatis lysine exporter polypeptide is at least 80% identical to SEQ ID NO:93 or SEQ ID NO:94 (e.g., a sequence at least 80%, 85%, 90%, 92%, 94%, 95%, 96%, 97%, 98%, 99% or more identical to SEQ ID NO:93 or SEQ ID NO:94); the Streptomyces coelicolor lysine exporter polypeptide comprises SEQ ID NO:95 or a variant sequence thereof; the Lactobacillus plantarum lysine exporter polypeptide comprises SEQ ID NO:96 or a variant sequence thereof; the Corynebacterium glutamicum lysine exporter polypeptide comprises SEQ ID NO:234 or a variant sequence thereof; and the Escherichia coli lysine exporter polypeptide comprises SEQ ID NO:237 or a variant sequence thereof.

[0115] The invention features a coryneform bacterium or a bacterium of the family Enterobacteriaceae such as an Escherichia coli bacterium comprising a nucleic acid molecule that encodes a bacterial O-succinylhomoserine (thio)-lyase/O-acetylhomoserine (thio)-lyase polypeptide (e.g., a Corynebacterium glutamicum O-succinylhomoserine (thio)-lyase polypeptide or functional variant thereof; a Mycobacterium smegmatis O-succinylhomoserine (thio)-lyase polypeptide or functional variant thereof; a Streptomyces coelicolor O-succinylhomoserine (thio)-lyase polypeptide or a functional variant thereof; a Thermobifida fusca O-succinylhomoserine (thio)-lyase polypeptide or a functional variant thereof; an Escherichia coli O-succinylhomoserine (thio)-lyase polypeptide or a functional variant thereof; or a Lactobacillus plantarum O-succinylhomoserine (thio)-lyase polyp eptide or a functional variant thereof) or a functional variant thereof.

[0116] In various embodiments the Mycobacterium smegmatis O-succinylhomoserine (thio)-lyase polypeptide is at least 80% identical to SEQ ID NO:97 or SEQ ID NO:98 (e.g., a sequence at least 80%, 85%, 90%, 92%, 94%, 95%, 96%, 97%, 98%, 99% or more identical to SEQ ID NO:97 or SEQ ID NO:98); the Streptomyces coelicolor O-succinylhomoserine (thio)-lyase polypeptide comprises SEQ ID NO:99 or a variant sequence thereof; the Thermobifida fusca O-succinylhomoserine (thio)-lyase polypeptide comprises SEQ ID NO:100 or a variant sequence thereof; the Lactobacillus plantarum O-succinylhomoserine (thio)-lyase polypeptide comprises SEQ ID NO: 101 or a variant sequence thereof; the Corynebacterium glutamicum O-succinylhomoserine (thio)-lyase polypeptide comprises SEQ ID NO:235 or a variant sequence thereof; and the Escherichia coli O-succinylhomoserine (thio)-lyase polypeptide comprises SEQ ID NO:236 or a variant sequence thereof.

[0117] The invention features a coryneform bacterium or a bacterium of the family Enterobacteriaceae such as an Escherichia coli bacterium comprising a nucleic acid molecule that encodes a threonine efflux polypeptide (e.g. a Corynebacterium glutamicum threonine efflux polypeptide or a functional variant thereof; a homolog of the Corynebacterium glutamicum threonine efflux polypeptide or a functional variant thereof; a Streptomyces coelicolor putative threonine efflux polypeptide or a functional variant thereof) or functional variant thereof.

[0118] In various embodiments the Corynebacterium glutamicum threonine efflux polypeptide comprises SEQ ID NO: 196 or a variant sequence thereof; the homolog of the Corynebacterium glutamicum threonine efflux polypeptide comprises a homolog of SEQ ID NO: 196 or a variant sequence thereof; and the Streptomyces coelicolor putative threonine efflux polypeptide comprises SEQ ID NO: 102 or a variant sequence thereof.

[0119] The invention also features a coryneform bacterium or a bacterium of the family Enterobacteriaceae such as an Escherichia coli bacterium comprising a nucleic acid molecule that encodes C. glutamicum hypothetical polypeptide (SEQ ID NO: 198), a bacterial homolog of C. glutamicum hypothetical polypeptide (SEQ ID NO: 198), (e.g., a Mycobacterium smegmatis hypothetical polypeptide or functional variant thereof; a Streptomyces coelicolor hypothetical polypeptide or a functional variant thereof; a Thermobifida fusca hypothetical polypeptide or a functional variant thereof; an Escherichia coli hypothetical polypeptide or a functional variant thereof; or a Lactobacillus plantarum hypothetical polypeptide or a functional variant thereof) or a functional variant thereof.

[0120] In various embodiments the the bacterial homolog is: a Mycobacterium smegmatis hypothetical polypeptide at least 80% identical to SEQ ID NO:104 or SEQ ID NO:105 (e.g., a sequence at least 80%, 85%, 90%, 92%, 94%, 95%, 96%, 97%, 98%, 99% or more identical to SEQ ID NO: 104 or SEQ ID NO: 105); the Streptomyces coelicolor hypothetical polypeptide comprises SEQ ID NO:103 or a variant sequence thereof; the Thermobifida fusca hypothetical polypeptide comprises SEQ ID NO106 or a variant sequence thereof; the Lactobacillus plantarum hypothetical polypeptide comprises SEQ ID NO:107 or a variant sequence thereof.

[0121] The invention also features a coryneform bacterium or a bacterium of the family Enterobacteriaceae such as an Escherichia coli bacterium comprising a nucleic acid molecule that encodes C. glutamicum putative membrane polypeptide (SEQ ID NO:201), a bacterial homolog of C. glutamicum putative membrane polypeptide (SEQ ID NO:201), (e.g., a Streptomyces coelicolor putative membrane polypeptide or a functional variant thereof; a Thermobifida fusca putative membrane polypeptide or a functional variant thereof; an Erwinia chrysanthemi putative membrane polypeptide or a functional variant thereof; an Escherichia coli putative membrane polypeptide or a functional variant thereof; a Lactobacillus plantarum putative membrane polypeptide or a functional variant thereof; or a Pectobacterium chrysanthemi putative membrane polypeptide or a functional variant thereof) or a functional variant thereof.

[0122] In various embodiments the Streptomyces coelicolor putative membrane polypeptide comprises SEQ ID NO:111, SEQ ID NO: 112, SEQ ID NO: 113, SEQ ID NO: 114, oravariant sequence thereof; the Thermobifida fusca putative membrane polypeptide comprises SEQ ID NO: 108, SEQ ID NO: 109, SEQ ID NO: 110, or a variant sequence thereof; the Erwinia chrysanthemi putative membrane polypeptide comprises SEQ ID NO: 115 or a variant sequence thereof; the Pectobacterium chrysanthemi putative membrane polypeptide comprises SEQ ID NO:116 or a variant sequence thereof; the Lactobacillus plantarum putative membrane polypeptide comprises SEQ ID NO:1 17, SEQ ID NO:1 18, SEQ ID NO:1 19, or a variant sequence thereof.

[0123] The invention also features a coryneform bacterium or a bacterium of the family Enterobacteriaceae such as an Escherichia coli bacterium comprising a nucleic acid molecule that encodes C. glutamicum drug permease polypeptide (SEQ ID NO:199), a bacterial homolog of C. glutamicum drug permease polypeptide (SEQ ID NO: 199), (e.g., a Streptomyces coelicolor drug permease polypeptide or a functional variant thereof; a Thermobifida fusca drug permease polypeptide or a functional variant thereof; an Escherichia coli drug permease polypeptide or a functional variant thereof;or a Lactobacillus plantarum drug permease polypeptide or a functional variant thereof) or a functional variant thereof.

[0124] In various embodiments the Streptomyces coelicolor drug permease polypeptide comprises SEQ ID NO: 120, SEQ ID NO: 121, or a variant sequence thereof; the Thermobifida fusca drug permease polypeptide comprises SEQ ID NO: 122, SEQ ID NO: 123, or a variant sequence thereof; the Lactobacillus plantarum drug permease polypeptide comprises SEQ ID NO: 124 or a variant sequence thereof.

[0125] The invention also features a coryneform bacterium or a bacterium of the family Enterobacteriaceae such as an Escherichia coli bacterium comprising a nucleic acid molecule that encodes C. glutamicum hypothetical membrane polypeptide (SEQ iID NO: 197), a bacterial homolog of C. glutamicum hypothetical membrane polypeptide (SEQ ID NO: 197), (e.g., a Thermobifida fusca hypothetical membrane polypeptide or a functional variant thereof).

[0126] In various embodiments the Thermobifida fusca hypothetical membrane polypeptide comprises SEQ ID NO:125 or a variant sequence thereof.

[0127] As mentioned above, the invention also provides nucleic acids encoding variant bacterial proteins. Nucleic acids that include sequences encoding variant bacterial polypeptides can be expressed in the organism from which the sequence was derived, or they can be expressed in an organism other than the organism from which they were derived (e.g., heterologous organisms).

[0128] In one aspect, the invention features an isolated nucleic acid (e.g., a nucleic acid expression vector) that encodes a variant of a bacterial polypeptide (e.g., a variant of a wild-type bacterial polypeptide) that regulates the production of one or more amino acids from the aspartic acid family of amino acids or related metabolites. The bacterial polypeptide can include, for example, the following amino acid sequence: G₁-X₂-K₃-X₄-X₅-X₆-X₇-X₈-X₉-X₁₀-X₁₁-X₁₂-X₁₃-X₁₃ₐ-X_{13b}-X_{13c}-X_{13d}-X₁₃ₑ-X_{13f}-X_{13g}-X₁₃ₕ-X₁₃ᵢ-X₁₃ⱼ-X₁₃ₖ-X₁₃ₗ-F₁₄-X₁₅-Z₁₆-X₁₇-X₁₈-X₁₉-X₂₀-X₂₁-X₂₁ₐ-X_{21b}-X_{21c}-X_{21d}-X₂₁ₑ-X_{21f}-X_{21g}-X₂₁ₕ-X₂₁ᵢ-X₂₁ⱼ-X₂₁ₖ-X₂₁ₗ-X₂₁ₘ-X₂₁ₙ-X₂₁ₒ-X₂₁ₚ-X_{21q}-Xᵣ-X₂₁ₛ-X₂₁ₜ-D₂₂ (SEQ ID NO:360), wherein each of X₂, X₄-X₁₃, X₁₅, and X₁₇-X₂₀ is, independently, any amino acid, wherein each of X₁₃ₐ-X₁₃ₗ is, independently, any amino acid or absent, wherein each of X₂₁ₐ-X₂₁ₜ is, independently, any amino acid or absent, and wherein Z₁₆ is selected from valine, aspartate, glycine, isoleucine, and leucine. The variant of the bacterial polypeptide includes an amino acid change relative to the bacterial protein, e.g., at one or more of G₁, K₃, F₁₄, Z₁₆, or D₂₂ of SEQ ID NO:360, or at an amino acid within 8, 5, 3, 2, or 1 residue of G₁, K₃, F₁₄, Z₁₆, or D₂₂ of SEQ ID NO:360. In one embodiment, variant of the bacterial polypeptide is otherwise identical in amino acid sequence to the bacterial protein, or at least 80%, 85%, 90%, 92%, 94%, 95%, 96%, 97%, 98%, 99%, or more identical to the bacterial polypeptide, e.g., the variant comprises fewer than 50, 40, 25, 15, 10, 7, 5, 3, 2, or 1 changes relative to the bacterial polypeptide.

[0129] Alternatively, or in addition, the bacterial polypeptide includes the following amino acid sequence: L₁-X₂-X₃-G₄-G₅-X₆-F₇-X₈-X₉-X₁₀-X₁₁ (SEQ ID NO:361), wherein each of X₂, X₄-X₁₃, X₁₅, and X₁₇-X₂₀ is, independently, any amino acid,wherein X₈ is selected from valine, leucine, isoleucine, and aspartate, and wherein X₁₁ is selected from valine, leucine, isoleucine, phenylalanine, and methionine; and the variant of the bacterial protein includes an amino acid change e.g., at one or more of L₁, G₄, X₈, X₁₁, or at an amino acid residue within 8, 5, 3, 2, or 1 residue of L₁, G₄, X₈, or X₁₁ of SEQ ID NO: 361).

[0130] In various embodiments, feedback inhibition of the variant of the bacterial polypeptide by S-adenosylmethionine is reduced, e.g., relative to the bacterial polypeptide (e.g., relative to a wild-type bacterial protein) or relative to a reference protein.

[0131] Amino acid changes in the variant of the bacterial polypeptide can be changes to alanine (e.g., wherein the original residue is other than an alanine) or non-conservative changes. The changes can be conservative changes.

[0132] The invention also features polypeptides encoded by the nucleic acids described herein, e.g., a polypeptide encoded by a nucleic acid that encodes a variant of a bacterial polypeptide (e.g., a variant of a wild-type bacterial polypeptide) that regulates the production of one or more amino acids from the aspartic acid family of amino acids or related metabolites, wherein the bacterial polypeptide includes SEQ ID NO:360 or SEQ ID NO:361, and wherein the variant includes an amino acid change relative to the bacterial polypeptide.

[0133] Also provided is a method for making a nucleic acid encoding a variant of a bacterial polypeptide that regulates the production of one or more amino acids from the aspartic acid family of amino acids or related metabolites. The method includes, for example, identifying a motif in the amino acid sequence of a wild-type form of the bacterial polypeptide, and constructing a nucleic acid that encodes a variant wherein one or more amino acid residues (e.g., one, two, three, four, or five residues) within and/or near (e.g., within 10, 8, 7, 5, 3, 2, or 1 residues) the motif is changed.

[0134] In various embodiments, the motif in the bacterial polypeptide includes the following amino acid sequence: G₁-X₂-K₃-X₄-X₅-X₆-X₇-X₈-X₉-X₁₀-X₁₁-X_{X}₁₂-X₁₃-X₁₃ₐ-X_{13b}-X_{13c}-X_{13d}-X₁₃ₑ-X_{13f}-X_{13g}-X₁₃ₕ-X₁₃ᵢ-X₁₃ⱼ-X₁₃ₖ-X₂₃ₗ-F₁₄-X₁₅-Z₁₆-X₁₇-X₁₈-X₁₉-X₂₀-X₂₁-X₂₁ₐ-X_{21b}-X_{21c}-X_{21d}-X₂₁ₑ-X_{21f}-X_{21g}-X₂₁ₕ-X₂₁ᵢ-X₂₁ⱼ-X₂₁ₖ-X₂₁ₗ-X₂₁ₘ-X₂₁ₙ-X₂₁ₒ-X₂₁ₚ-X_{21q}-X₂₁ᵣ-X₂₁ₛ-X₂₁ₜ-D₂₂ (SEQ ID NO:360), wherein each of X₂, X₄-X₁₃, X₁₅, and X₁₇-X₂₀ is, independently, any amino acid, wherein each of X₁₃ₐ-X₁₃ₗ is, independently, any amino acid or absent, wherein each of X₂₁ₐ-X₂₁ₜ is, independently, any amino acid or absent, and wherein Z₁₆ is selected from valine, aspartate, glycine, isoleucine, and leucine. In various embodiments, one or more of G₁, K₃, F₁₄, Z₁₆, or D₂₂ of SEQ ID NO:360 is changed. In one embodiment, the variant of the bacterial polypeptide is otherwise identical in amino acid sequence to the bacterial polypeptide. In various embodiments, the motif in the bacterial polypeptide includes the following amino acid sequence: L₁-X₂-X₃-G₄-G₅-X₆-F₇-X₈-X₉- X₁₀-X₁₁ (SEQ ID NO:361), wherein each of X₂, X₄-X₁₃, X₁₅, and X₁₇-X₂₀ is, independently, any amino acid, wherein X₈ is selected from valine, leucine, isoleucine, and aspartate, and wherein X₁₁ is selected from valine, leucine, isoleucine, phenylalanine, and methionine. In various embodiments, one or more of L₁, G₄, X₈, X₁₁ of SEQ ID NO: 361 is changed. In one embodiment, the variant of the bacterial polypeptide is otherwise identical in amino acid sequence to the bacterial protein.

[0135] The invention also features a bacterium that includes a nucleic acid described herein, e.g., a nucleic acid that encodes a variant of a bacterial polypeptide (e.g., a variant of a wild-type bacterial polypeptide) that regulates the production of one or more amino acids from the aspartic acid family of amino acids or related metabolites, wherein the bacterial polypeptide includes SEQ ID NO:360 or SEQ ID NO:361, and wherein the variant includes an amino acid change relative to the bacterial polypeptide. The bacterium can be a genetically modified bacterium, e.g., a bacterium that has been modified to include the nucleic acid (e.g., by transformation of the nucleic acid, e.g., wherein the nucleic acid is episomal, or wherein the nucleic acid integrates into the genome of the bacterium, either at a random location, or at a specifically targeted location), and/or that has been modified within its genome (e.g., modified such that an endogenous gene has been altered by mutagenesis or replaced by recombination, or modified to include a heterologous promoter upstream of an endogenous gene.

[0136] The invention also features a method for producing an amino acid or a related metabolite. The methods can include, for example: cultivating a bacterium (e.g., a genetically modified bacterium) that includes a nucleic acid encoding a variant of a bacterial polypeptide (e.g., a variant of a wild-type bacterial polypeptide) that regulates the production of one or more amino acids from the aspartic acid family of amino acids or related metabolites, wherein the bacterial polypeptide includes SEQ ID NO:360 or SEQ ID NO:361, and wherein the variant includes an amino acid change relative to the bacterial polypeptide. The bacterium is cultivated under conditions in which the nucleic acid is expressed and that allow the amino acid (or related metabolite(s)) to be produced, and a composition that includes the amino acid (or related metabolite(s)) is collected. The composition can include, for example, culture supernatants, heat or otherwise killed cells, or purified amino acid.

[0137] In one aspect, the invention features an isolated nucleic acid encoding a variant bacterial homoserine O-acetyltransferase polypeptide. In certain embodiments, the variant bacterial homoserine O-acetyltransferase polypeptide exhibits reduced feedback inhibition, e.g., relative to a wild-type form of the bacterial homoserine O-acetyltransferase polypeptide. In various embodiments, the nucleic acid encodes a homoserine O-acetyltransferase polypeptide with reduced feedback inhibition by S-adenosylmethionine. In various embodiments, the bacterial homoserine O-acetyltransferase polypeptide is chosen from: a Corynebacterium glutamicum homoserine O-acetyltransferase polypeptide, a Mycobacterium smegmatis homoserine O-acetyltransferase polypeptide, a Thermobifida fusca homoserine O-acetyltransferase polypeptide, an Amycolatopsis mediterranei homoserine O-acetyltransferase polypeptide, a Streptomyces coelicolor homoserine O-acetyltransferase polypeptide, an Erwinia chrysanthemi homoserine O-acetyltransferase polypeptide, a Shewanella oneidensis homoserine O-acetyltransferase polypeptide, a Mycobacterium tuberculosis homoserine O-acetyltransferase polypeptide, an Escherichia coli homoserine O-acetyltransferase polypeptide, a Corynebacterium acetoglutamicum homoserine O-acetyltransferase polypeptide, a Corynebacterium melassecola homoserine O-acetyltransferase polypeptide, a Corynebacterium thermoaminogenes homoserine O-acetyltransferase polypeptide, a Brevibacterium lactofermentum homoserine O-acetyltransferase polypeptide, a Brevibacterium lactis homoserine O-acetyltransferase polypeptide, and a Brevibacterium flavum homoserine O-acetyltransferase polypeptide.

[0138] In another aspect, the invention features an isolated nucleic acid encoding a variant bacterial homoserine O-acetyltransferase polypeptide, wherein the variant homoserine O-acetyltransferase polypeptide is a variant of a homoserine O-acetyltransferase polypeptide including the following amino acid sequence: G₁-X₂-K₃-X₄-X₅-X₆-X₇-X₈-X₉-X₁₀-X₁₁-X₁₂-X₁₃-X₁₃ₐ-X_{13b}-X_{13c}-X_{13d}-X₁₃ₑ-X_{13f}-X_{13g}-X₁₃ₕ-X₁₃ᵢ-X₁₃ⱼ-X₁₃ₖ-X₁₃ₗ-F₁₄-X₁₅-Z₁₆-X₁₇-X₁₈-X₁₉-X₂₀-X₂₁-X₂₁ₐ-X_{21b}-X_{21c}-X_{21d}-X₂₁ₑ-X_{21f}-X_{21g}-X₂₁ₕ-X₂₁ᵢ-X₂₁ⱼ-X₂₁ₖ-X₂₁ₗ-X₂₁ₘ-X₂₁ₙ-X₂₁ₒ-X₂₁ₚ-X_{21q}-X₂₁ᵣ-X₂₁ₛ-X₂₁ₜ-D₂₂ (SEQ ID NO:360), wherein each of X₂, X₄-X₁₃, X₁₅, and X₁₇-X₂₀ is, independently, any amino acid, wherein each of X₁₃ₐ-X₁₃ₗ is, independently, any amino acid or absent, wherein each of X₂₁ₐ-X₂₁ₜ is, independently, any amino acid or absent, and wherein Z₁₆ is selected from valine, aspartate, glycine, isoleucine, and leucine; wherein the variant homoserine O-acetyltransferase polypeptide includes an amino acid change at one or more of G₁, K₃, F₁₄, Z₁₆, or D₂₂ of SEQ ID NO:360. In various embodiments, the amino acid change is a change to an alanine.

[0139] In another aspect, the invention features an isolated nucleic acid encoding a variant bacterial homoserine O-acetyltransferase polypeptide, wherein the variant homoserine O-acetyltransferase polypeptide is a C. glutamicum homoserine O-acetyltransferase polypeptide including an amino acid change in one or more of the following residues of SEQ ID NO:212: Glycine 231, Lysine 233, Phenylalanine 251, Valine 253, and Aspartate 269. In various embodiments, the amino acid change is a change to an alanine.

[0140] In another aspect, the invention features an isolated nucleic acid encoding a variant bacterial homoserine O-acetyltransferase polypeptide, wherein the variant homoserine O-acetyltransferase polypeptide is a T fusca homoserine O-acetyltransferase polypeptide including an amino acid change in one or more of the following residues of SEQ ID NO:24: Glycine 81, Aspartate 287, Phenylalanine 269.

[0141] In another aspect, the invention features an isolated nucleic acid encoding a variant bacterial homoserine O-acetyltransferase polypeptide, wherein the variant homoserine O-acetyltransferase polypeptide is an E. coli homoserine O-acetyltransferase polypeptide including an amino acid change at Glutamate 252 of SEQ ID NO:213.

[0142] In another aspect, the invention features an isolated nucleic acid encoding a variant bacterial homoserine O-acetyltransferase polypeptide, wherein the variant homoserine O-acetyltransferase polypeptide is a mycobacterial homoserine O-acetyltransferase polypeptide including an amino acid change in a residue corresponding to one or more of the following residues of M leprae homoserine O-acetyltransferase polypeptide set forth in SEQ ID NO: 23: Glycine 73, Aspartate 278, and Tyrosine 260. In various embodiments, the variant bacterial homoserine O-acetyltransferase polypeptide is a variant of a M. smegmatis homoserine O-acetyltransferase polypeptide.

[0143] In another aspect, the invention features an isolated nucleic acid encoding a variant bacterial homoserine O-acetyltransferase polypeptide, wherein the variant homoserine O-acetyltransferase polypeptide is an M. tuberculosis homoserine O-acetyltransferase polypeptide including an amino acid change in one or more of the following residues of SEQ ID NO:22: Glycine 73, Tyrosine 260, and Aspartate 278.

[0144] The invention also features polypeptides encoded by, and bacteria including, the nucleic acids encoding variant bacterial homoserine O-acetyltransferases. In various embodiments, the bacteria are coryneform bacteria. The bacteria can further include nucleic acids encoding other variant bacterial proteins (e.g., variant bacterial proteins involved in amino acid production, e.g., variant bacterial proteins described herein).

[0145] In another aspect, the invention features a method for producing L-methionine or related intermediates such as O-acetyl homoserine, cystathionine, homocysteine, methionine, SAM and derivatives thereof, the method including: cultivating a genetically modified bacterium including a nucleic acid encoding a variant bacterial homoserine O-acetyltransferase under conditions in which the nucleic acid is expressed and that allow L-methionine (or related intermediate) to be produced, and collecting the culture. The culture can be fractionated (e.g., to remove cells and/or to obtain fractions enriched in L-methionine).

[0146] In another aspect, the invention features an isolated nucleic acid encoding a variant bacterial O-acetylhomoserine sulfhydrylase polypeptide. In certain embodiments, the variant bacterial homoserine O-acetylhomoserine sulfhydrylase polypeptide exhibits reduced feedback inhibition, e.g., relative to a wild-type form of the bacterial O-acetylhomoserine sulfhydrylase polypeptide.

[0147] In various embodiments, the nucleic acid encodes an O-acetylhomoserine sulfhydrylase polypeptide with reduced feedback inhibition by S-adenosylmethionine.

[0148] In various embodiments, the bacterial O-acetylhomoserine sulfhydrylase polypeptide is chosen from: a Corynebacterium glutamicum homoserine O-acetylhomoserine sulfhydrylase polypeptide, a Mycobacterium smegmatis homoserine O-acetylhomoserine sulfhydrylase polypeptide, a Thermobifida fusca O-acetylhomoserine sulfhydrylase polypeptide, an Amycolatopsis mediterranei O-acetylhomoserine sulfhydrylase polypeptide, a Streptomyces coelicolor O-acetylhomoserine sulfhydrylase polypeptide, an Erwinia chrysanthemi homoserine O-acetylhomoserine sulfhydrylase polypeptide, a Shewanella oneidensis O-acetylhomoserine sulfhydrylase polypeptide, a Mycobacterium tuberculosis O-acetylhomoserine sulfhydrylase polypeptide, an Escherichia coli O-acetylhomoserine sulfhydrylase polypeptide, a Corynebacterium acetoglutamicum O-acetylhomoserine sulfhydrylase polypeptide, a Corynebacterium melassecola O-acetylhomoserine sulfhydrylase polypeptide, a Corynebacterium thermoaminogenes O-acetylhomoserine sulfhydrylase polypeptide, a Brevibacterium lactofermentum O-acetylhomoserine sulfhydrylase polypeptide, a Brevibacterium lactis O-acetylhomoserine sulfhydrylase polypeptide, and a Brevibacterium flavum O-acetylhomoserine sulfhydrylase polypeptide.

[0149] In another aspect, the invention features an isolated nucleic acid encoding a variant bacterial O-acetylhomoserine sulfhydrylase polypeptide, wherein the variant O-acetylhomoserine sulfhydrylase polypeptide is a variant of an O-acetylhomoserine sulfhydrylase polypeptide including the following amino acid sequence: G₁-X₂-K₃-X₄-X₅-X₆-X₇-X₈-X₉-X₁₀-X₁₁-X₁₂-X₁₃-X₁₃ₐ-X_{13b}-X_{13c}-X_{13d}-X₁₃ₑ-X_{13f}-X_{13g}-X₁₃ₕ-X₁₃ᵢ-X₁₃ⱼ-X₁₃ₖ-X₁₃ₗ-F₁₄-X₁₅-Z₁₆-X₁₇-X₁₈-X₁₉-X₂₀-X₂₁-X₂₁ₐ-X_{21b}-X_{21c}-X_{21d}-X₂₁ₑ-X_{21f}-X_{21g}-X₂₁ₕ-X₂₁ᵢ-X₂₁ⱼ-X₂₁ₖ-X₂₁ₗ-X₂₁ₘ-X₂₁ₙ-X₂₁ₒ-X₂₁ₚ-X_{21q}-X₂₁ᵣ-X₂₁ₛ-X₂₁ₜ-D₂₂ (SEQ ID NO:360), wherein each of X₂, X₄-X₁₃, X₁₅, and X₁₇-X₂₀ is, independently, any amino acid, wherein each of X₁₃ₐ-X₁₃ₗ is, independently, any amino acid or absent, wherein each of X₂₁ₐ-X₂₁ₜ is, independently, any amino acid or absent, and wherein Z₁₆ is selected from valine, aspartate, glycine, isoleucine, and leucine; wherein the variant O-acetylhomoserine sulfhydrylase polypeptide includes an amino acid change at one or more of G₁, K₃, F₁₄, Z₁₆, or D₂₂ of SEQ ID NO:360.

[0150] In various embodiments, the amino acid change is a change to an alanine.

[0151] In another aspect, the invention features an isolated nucleic acid encoding a variant bacterial O-acetylhomoserine sulfhydrylase polypeptide, wherein the variant O-acetylhomoserine sulfhydrylase polypeptide is a variant of a O-acetylhomoserine sulffiydrylase polypeptide including the following amino acid sequence: L₁-X₂-X₃-G₄-G₅-X₆-F₇-X₈-X₉-X₁₀-X₁₁ (SEQ ID NO:361), wherein X is any amino acid, wherein X₈ is selected from valine, leucine, isoleucine, and aspartate, and wherein X₁₁ is selected from valine, leucine, isoleucine, phenylalanine, and methionine; wherein the variant of the bacterial polypeptide includes an amino acid change at one or more of L₁, G₄, X₈, X₁₁ of SEQ ID NO:361.

[0152] In various embodiments, the amino acid change is a change to an alanine.

[0153] In another aspect, the invention features an isolated nucleic acid encoding a variant bacterial O-acetylhomoserine sulfhydrylase polypeptide, wherein the variant O-acetylhomoserine sulfhydrylase polypeptide is a C. glutamicum O-acetylhomoserine sufhydrylase polypeptide including an amino acid change in one or more of the following residues of SEQ ID NO:214: Glycine 227, Leucine 229, Aspartate 231, Glycine 232, Glycine 233, Phenylalanine 235, Aspartate 236, Valine 239, Phenylalanine 368, Aspartate 370, Aspartate 383, Glycine 346, and Lysine 348. In various embodiments, the amino acid change is a change to an alanine.

[0154] In another aspect, the invention features an isolated nucleic acid encoding a variant bacterial O-acetylhomoserine sulffiydrylase polypeptide, wherein the variant O-acetylhomoserine sulfhydrylase polypeptide is a T. fusca O-acetylhomoserine sulfhydrylase polypeptide including an amino acid change in one or more of the following residues of SEQ ID NO:25: Glycine 240, Aspartate 244, Phenylalanine 379, and Aspartate 394.

[0155] In another aspect, the invention features an isolated nucleic acid encoding a variant bacterial O-acetylhomoserine sulfhydrylase polypeptide, wherein the variant O-acetylhomoserine sulfhydrylase polypeptide is a M. smegmatis O-acetylhomoserine sulfhydrylase polypeptide including an amino acid change in one or more of the following residues of SEQ ID NO:287: Glycine 303, Aspartate 307, Phenylalanine 439, Aspartate 454.

[0156] In another aspect, the invention features a polypeptide encoded by a nucleic acid encoding a variant bacterial O-acetylhomoserine sulfhydrylase.

[0157] In another aspect, the invention features a bacterium comprising the nucleic acid encoding a variant bacterial O-acetylhomoserine sulfhydrylase polypeptide. In various embodiments, the bacterium is a coryneform bacterium. The bacterium can further comprise one or more nucleic acids encoding other variant bacterial polypeptides (e.g., variant bacterial polypeptides involved in amino acid production, e.g., a variant bacterial polypeptide described herein).

[0158] In another aspect, the invention features a method for producing L-methionine or related intermediates (e.g., homocysteine, methionine, S-AM, or derivatives thereof), the method comprising: cultivating a genetically modified bacterium comprising the nucleic acid encoding a variant bacterial O-acetylhomoserine sulfhydrylase polypeptide under conditions in which the nucleic acid is expressed and that allow L-methionine to be produced, and collecting the culture. The culture can be fractionated (e.g., to remove cells and/or to obtain fractions enriched in L-methionine).

[0159] In another aspect, the invention features an isolated nucleic acid encoding a variant bacterial mcbR gene product. In various embodiments, the variant bacterial mcbR gene product exhibits reduced feedback inhibition relative to a wild-type form of the mcbR gene product. In various embodiments, the nucleic acid encodes a mcbR gene product with reduced feedback inhibition by S-adenosylmethionine. In various embodiments, the bacterial mcbR gene product is chosen from: a Corynebacterium glutamicum mcbR gene product, a Corynebacterium acetoglutamicum mcbR gene product, a Corynebacterium melassecola mcbR gene product, and a Corynebacterium thermoaminogenes mcbR gene product.

[0160] In another aspect, the invention features an isolated nucleic acid encoding a variant bacterial mcbR gene product, wherein the variant mcbR gene product is a variant of an mcbR gene product including the following amino acid sequence: G₁-X₂-K₃-X₄-X₅-X₆-X₇-X₈-X₉-X₁₀-X₁₁-X₁₂-X₁₃-X₁₃ₐ-X_{13b}-X_{13c}-X_{13d}-X₁₃ₑ-X_{13f}-X_{13g}-X₁₃ₕ-X₁₃ᵢ-X₁₃ⱼ-X₁₃ₖ-X₁₃ₗ-F₁₄-X₁₅-Z₁₆-X₁₇-X₁₈-X₁₉-X₂₀-X₂₁-X₂₁ₐ-X_{21b}-X_{21c}-X_{21d}-X₂₁ₑ-X_{21f}-X_{21g}-X₂₁ₕ-X₂₁ᵢ-X₂₁ⱼ-X₂₁ₖ-X₂₁ₗ-X₂₁ₘ-X₂₁ₙ-X₂₁ₒ-X₂₁ₚ-X_{21q}-X₂₁ᵣ-X₂₁ₛ-X₂₁ₜ-D₂₂ (SEQ ID NO:360), wherein each of X₂, X₄-X₁₃, X₁₅, and X₁₇-X₂₀ is, independently, any amino acid, wherein each of X₁₃ₐ-X₁₃ₗ is, independently, any amino acid or absent, wherein each of X₂₁ₐ-X₂₁ₜ is, independently, any amino acid or absent, and wherein Z₁₆ is selected from valine, aspartate, glycine, isoleucine, and leucine; wherein the variant mcbR gene product includes an amino acid change at one or more of G₁, K₃, F₁₄, Z₁₆, or D₂₂ of SEQ ID NO:360. In various embodiments, the amino acid change is a change to an alanine.

[0161] In another aspect, the invention features an isolated nucleic acid encoding a variant bacterial mcbR gene product, wherein the variant mcbR gene product is a C. glutamicum mcbR gene product including an amino acid change in one or more of the following residues of SEQ ID NO:363: Glycine 92, Lysine 94, Phenylalanine 116, Glycine 118, and Aspartate 134. In various embodiments, the amino acid change is a change to an alanine.

[0162] The invention also features a polypeptide encoded by the nucleic acids encoding a variant bacterial mcbR gene product.

[0163] The invention also features a bacterium including the nucleic acids encoding a variant bacterial mcbR gene product. In various embodiments, the bacterium is a coryneform bacterium. The bacterium can further comprise one or more nucleic acids encoding other variant bacterial polypeptides (e.g., variant bacterial polypeptides involved in amino acid production, e.g., variant bacterial polypeptides described herein).

[0164] The invention also features methods for producing L-methionine, the method including: cultivating a genetically modified bacterium including a nucleic acid encoding a variant bacterial mcbR gene product under conditions in which the nucleic acid is expressed and that allow L-methionine to be produced, and collecting the culture. The culture can be fractionated (e.g., to remove cells and/or to obtain fractions enriched in L-methionine).

[0165] In another aspect, the invention features an isolated nucleic acid encoding a variant bacterial aspartokinase polypeptide. In various embodiments, the variant bacterial aspartokinase polypeptide exhibits reduced feedback inhibition relative to a wild-type form of the bacterial aspartokinase polypeptide. In various embodiments, the nucleic acid encodes an aspartokinase polypeptide with reduced feedback inhibition by S-adenosylmethionine. In various embodiments, the bacterial aspartokinase polypeptide is chosen from: a Corynebacterium glutamicum aspartokinase polypeptide, a Mycobacterium smegmatis aspartokinase polypeptide, a Thermobifida fusca aspartokinase polypeptide, an Amycolatopsis mediterranei aspartokinase polypeptide, a Streptomyces coelicolor aspartokinase polypeptide, an Erwinia chrysanthemi aspartokinase polypeptide, a Shewanella oneidensis aspartokinase polypeptide, a Mycobacterium tuberculosis aspartokinase polypeptide, an Escherichia coli aspartokinase polypeptide, a Corynebacterium acetoglutamicum aspartokinase polypeptide, a Corynebacterium melassecola aspartokinase polypeptide, a Corynebacterium thermoaminogenes aspartokinase polypeptide, a Brevibacterium lactofermentum aspartokinase polypeptide, a Brevibacterium lactis aspartokinase polypeptide, and a Brevibacterium flavum aspartokinase polypeptide.

[0166] In another aspect, the invention features an isolated nucleic acid encoding a variant bacterial aspartokinase polypeptide, wherein the variant aspartokinase polypeptide is a variant of an aspartokinase polypeptide including the following amino acid sequence: G₁-X₂-K₃-X₄-X₅-X_{X}₆-X₇-X₈-X₉-X₁₀-X₁₁-X₁₂-X₁₃-X₁₃ₐ-X_{13b}-X_{13c}-X_{13d}-X₁₃ₑ-X_{13f}-X_{13g}-X₁₃ₕ-X₁₃ᵢ-X₁₃ⱼ-X₁₃ₖ-X₁₃ₗ-F₁₄-X₁₅-Z₁₆-X₁₇-X₁₈-X₁₉-X₂₀-X₂₁-X₂₁ₐ-X_{21b}-X_{21c}-X_{21d}-X₂₁ₑ-X_{21f}-X_{21g}-X₂₁ₕ-X₂₁ᵢ-X₂₁ⱼ-X₂₁ₖ-X₂₁ₗ-X₂₁ₘ-X₂₁ₙ-X₂₁ₒ-X₂₁ₚ-X_{21q}-X₂₁ᵣ-X₂₁ₛ-X₂₁ₜ-D₂₂ (SEQ ID NO:360), w wherein each of X₂, X₄-X₁₃, X₁₅, and X₁₇-X₂₀ is, independently, any amino acid, wherein each of X₁₃ₐ-X₁₃ₗ is, independently, any amino acid or absent, wherein each of X₂₁ₐ-X₂₁ₜ is, independently, any amino acid or absent, and wherein Z₁₆ is selected from valine, aspartate, glycine, isoleucine, and leucine; wherein the variant aspartokinase includes an amino acid change at one or more of G₁, K₃, F₁₄, Z₁₆, or D₂₂ of SEQ ID NO:360. In various embodiments, the amino acid change is a change to an alanine.

[0167] In another aspect, the invention features an isolated nucleic acid encoding a variant bacterial aspartokinase polypeptide, wherein the aspartokinase polypeptide is a C. glutamicum aspartokinase polypeptide including an amino acid change in one or more of the following residues of SEQ ID NO:202: Glycine 208, Lysine 210, Phenylalanine 223, Valine 225, and Aspartate 236. In various embodiments, the amino acid change is a change to an alanine.

[0168] The invention also features a polypeptide encoded by the nucleic acid encoding a variant bacterial aspartokinase polypeptide.

[0169] The invention also features a bacterium including the nucleic acid encoding a variant bacterial aspartokinase polypeptide. In various embodiments, the bacterium is a coryneform bacterium. The bacterium can further comprise one or more nucleic acids encoding other variant bacterial polypeptides (e.g., variant bacterial polypeptides involved in amino acid production, e.g., variant bacterial polypeptides described herein). In various embodiments, the bacterium further comprises one or more nucleic acid molecules (e.g., recombinant nucleic acid molecules) encoding a polypeptide involved in amino acid production (e.g., a polypeptide that is heterologous or homologous to the host cell, or a variant thereof). In various embodiments, the bacterium further comprises mutations in an endogenous sequence that result in increased or decreased activity of a polypeptide involved in amino acid production (e.g., by mutation of an endogenous sequence encoding the polypeptide involved in amino acid production or a sequence that regulates expression of the polypeptide, e.g., a promoter sequence).

[0170] The invention also features a method for producing an amino acid, the method including: cultivating a genetically modified bacterium including the nucleic acid encoding a variant bacterial aspartokinase polypeptide under conditions in which the nucleic acid is expressed and that allow the amino acid to be produced, and collecting the culture. The culture can be fractionated (e.g., to remove cells and/or to obtain fractions enriched in the amino acid).

[0171] In another aspect, the invention features an isolated nucleic acid encoding a variant bacterial O-succinylhomoserine/acetylhomoserine (thiol)-lyase polypeptide (O-succinylhomoserine (thiol)-lyase). In various embodiments, the variant O-succinylhomoserine (thiol)-lyase exhibits reduced feedback inhibition relative to a wild-type form of the O-succinylhomoserine (thiol)-lyase polypeptide. In various embodiments, the nucleic acid encodes an O-succinylhomoserine (thiol)-lyase polypeptide with reduced feedback inhibition by S-adenosylmethionine. In various embodiments, the bacterial O-succinylhomoserine (thiol)-lyase polypeptide is chosen from: a Corynebacterium glutamicum O-succinylhomoserine (thiol)-lyase polypeptide, a Mycobacterium smegmatis O-succinylhomoserine (thiol)-lyase polypeptide, a Thermobifida fusca O-succinylhomoserine (thiol)-lyase polypeptide, an Amycolatopsis mediterranei O-succinylhomoserine (thiol)-lyase polypeptide, a Streptomyces coelicolor O-succinylhomoserine (thiol)-lyase polypeptide, an Erwinia chrysanthemi O-succinylhomoserine (thiol)-lyase polypeptide, a Shewanella oneidensis O-succinylhomoserine (thiol)-lyase polypeptide, a Mycobacterium tuberculosis O-succinylhomoserine (thiol)-lyase polypeptide, an Escherichia coli O-succinylhomoserine (thiol)-lyase polypeptide, a Corynebacterium acetoglutamicum O-succinylhomoserine (thiol)-lyase polypeptide, a Corynebacterium melassecola O-succinylhomoserine (thiol)-lyase polypeptide, a Corynebacterium thermoaminogenes O-succinylhomoserine (thiol)-lyase polypeptide, a Brevibacterium lactofermentum O-succinylhomoserine (thiol)-lyase polypeptide, a Brevibacterium lactis O-succinylhomoserine (thiol)-lyase polypeptide, and a Brevibacterium flavum O-succinylhomoserine (thiol)-lyase polypeptide.

[0172] In another aspect, the invention features an isolated nucleic acid encoding a variant bacterial O-succinylhomoserine (thiol)-lyase polypeptide, wherein the variant O-succinylhomoserine (thiol)-lyase polypeptide is a variant of an O-succinylhomoserine (thiol)-lyase polypeptide including the following amino acid sequence: G₁-X₂-K₃-X₄-X₅-X₆-X₇-X₈-X₉-X₁₀-X₁₁-X₁₂-X₁₃ₐ-X_{13b}-X_{13c}-X_{13d}-X₁₃ₑ-X_{13f}-X_{13g}-X₁₃ₕ-X₁₃ᵢ-X₁₃ⱼ-X₁₃ₖ-X₁₃ₗ-F₁₄-X₁₅-Z₁₆-X₁₇-X₁₈-X₁₉-X₂₀-X₂₁-X₂₁ₐ-X_{21b}-X_{21c}-X_{21d}-X₂₁ₑ-X_{21f}-X_{21g}-X₂₁ₕ-X₂₁ᵢ-X₂₁ⱼ-X₂₁ₖ-X₂₁ₗ-X₂₁ₘ-X₂₁ₙ-X₂₁ₒ-X₂₁ₚ-X_{21q}-X₂₁ᵣ-X₂₁ₛ-X₂₁ₜ-D₂₂ (SEQ ID NO:360), wherein each of X₂, X₄-X₁₃, X₁₅, and X₁₇-X₂₀ is, independently, any amino acid, wherein each of X₁₃ₐ-X₁₃ₗ is, independently, any amino acid or absent, wherein each of X₂₁ₐ-X₂₁ₜ is, independently, any amino acid or absent, and wherein Z₁₆ is selected from valine, aspartate, glycine, isoleucine, and leucine; wherein the variant O-succinylhomoserine (thiol)-lyase polypeptide includes an amino acid change at one or more of G₁, K₃, F₁₄, Z₁₆, or D₂₂ of SEQ ID NO:360. In various embodiments, the amino acid change is a change to an alanine.

[0173] In another aspect, the invention features an isolated nucleic acid encoding a variant bacterial O-succinylhomoserine (thiol)-lyase polypeptide, wherein the variant O-succinylhomoserine (thiol)-lyase polypeptide is a C. glutamicum O-succinylhomoserine (thiol)-lyase polypeptide including an amino acid change in one or more of the following residues of SEQ ID NO:235: Glycine 72, Lysine 74, Phenylalanine 90, isoleucine 92, and Aspartate 105. In various embodiments, the amino acid change is a change to an alanine.

[0174] The invention also features a polypeptide encoded by a nucleic acid encoding a variant bacterial O-succinylhomoserine (thiol)-lyase polypeptide.

[0175] The invention also features a bacterium including a nucleic acid encoding a variant bacterial O-succinylhomoserine (thiol)-lyase polypeptide. In various embodiments, the bacterium is a coryneform bacterium. The bacterium can further comprise one or more nucleic acids encoding other variant bacterial polypeptides (e.g., variant bacterial polypeptides involved in amino acid production, e.g., variant bacterial polypeptides described herein).

[0176] The invention also features a method for producing L-methionine, the method including: cultivating a genetically modified bacterium including a nucleic acid encoding a variant bacterial O-succinylhomoserine (thiol)-lyase polypeptide under conditions in which the nucleic acid is expressed and that allow L-methionine to be produced, and collecting the culture. The culture can be fractionated (e.g., to remove cells and/or to obtain fractions enriched in L-methionine).

[0177] In another aspect, the invention features an isolated nucleic acid encoding a variant bacterial cystathionine beta-lyase polypeptide. In various embodiments, the variant cystathionine beta-lyase polypeptide exhibits reduced feedback inhibition relative to a wild-type form of the cystathionine beta-lyase polypeptide. In various embodiments, the nucleic acid encodes a cystathionine beta-lyase polypeptide with reduced feedback inhibition by S-adenosylmethionine. In various embodiments, the bacterial cystathionine beta-lyase polypeptide is chosen from: a Corynebacterium glutamicum cystathionine beta-lyase polypeptide, a Mycobacterium smegmatis cystathionine beta-lyase polypeptide, a Thermobifida fusca cystathionine beta-lyase polypeptide, an Amycolatopsis mediterranei cystathionine beta-lyase polypeptide, a Streptomyces coelicolor cystathionine beta-lyase polypeptide, an Erwinia chrysanthemi cystathionine beta-lyase polypeptide, a Shewanella oneidensis cystathionine beta-lyase polyp eptide, a Mycobacterium tuberculosis cystathionine beta-lyase polyp eptide, an Escherichia coli cystathionine beta-lyase polypeptide, a Corynebacterium acetoglutamicum cystathionine beta-lyase polypeptide, a Corynebacterium melassecola cystathione beta-lyase polypeptide, a Corynebacterium thermoaminogenes cystathionine beta-lyase polypeptide, a Brevibacterium lactofermentum cystathionine beta-lyase polypeptide, a Brevibacterium lactis cystathionine beta-lyase polypeptide, and a Brevibacteriumflavum cystathionine beta-lyase polypeptide.

[0178] In another aspect, the invention features an isolated nucleic acid encoding a variant bacterial cystathionine beta-lyase polypeptide, wherein the variant cystathionine beta-lyase polypeptide is a variant of a cystathionine beta-lyase polypeptide including the following amino acid sequence: G₁-X₂-X₃-X₄-X₅-X₆-X₇-X₈-X₉-X₁₀-X₁₁-X₁₂-X₁₃-X₁₃ₐ-X_{13b}-X_{13c}-X_{13d}-X₁₃ₑ-X_{13f}-X_{13g}-X₁₃ₕ-X₁₃ᵢ-X₁₃ⱼ-X₁₃ₖ-X₁₃ₗ-F₁₄-X₁₅-Z₁₆-X₁₇-X₁₈-X₁₉-X₂₀-X₂₁-X₂₁ₐ-X_{21b}-X_{21c}-X_{21d}-X₂₁ₑ-X_{21f}-X_{21g}-X₂₁ₕ-X₂₁ᵢ-X₂₁ⱼ-X₂₁ₖ-X₂₁ₗ-X₂₁ₘ-X₂₁ₙ-X₂₁ₒ-X₂₁ₚ-X_{21q}-X₂₁ᵣ-X₂₁ₛ-X₂₁ₜ-D₂₂ (SEQ ID NO:360), wherein each of X₂, X₄-X₁₃, X₁₅, and X₁₇-X₂₀ is, independently, any amino acid, wherein each of X₁₃ₐ-X₁₃ₗ is, independently, any amino acid or absent, wherein each of X₂₁ₐ-X₂₁ₜ is, independently, any amino acid or absent, and wherein Z₁₆ is selected from valine, aspartate, glycine, isoleucine, and leucine; wherein the variant cystathionine beta-lyase includes an amino acid change at one or more of G₁, K₃, F₁₄, Z₁₆, or D₂₂ of SEQ ID NO:360. In various embodiments, the amino acid change is a change to an alanine.

[0179] In another aspect, the invention features an isolated nucleic acid encoding a variant bacterial cystathionine beta-lyase polypeptide, wherein the variant cystathionine beta-lyase polypeptide is a C. glutamicum cystathionine beta-lyase polypeptide including an amino acid change in one or more of the following residues of SEQ ID NO:217: Glycine 296, Lysine 298, Phenylalanine 312, Glycine 314 and Aspartate 335. In various embodiments, the amino acid change is a change to an alanine.

[0180] The invention also features a polypeptide encoded by a nucleic acid encoding a variant bacterial cystathionine beta-lyase.

[0181] The invention also features a bacterium including a nucleic acid encoding a variant bacterial cystathionine beta-lyase polypeptide. In various embodiments, the bacterium is a coryneform bacterium. The bacterium can further comprise one or more nucleic acids encoding other variant bacterial polypeptides (e.g., variant bacterial polypeptides involved in amino acid production, e.g., variant bacterial polypeptides described herein).

[0182] The invention also features a method for producing L-methionine, the method including:

[0183] cultivating a genetically modified bacterium including a nucleic acid encoding a variant bacterial cystathionine beta-lyase polypeptide under conditions in which the nucleic acid is expressed and that allow L-methionine to be produced, and collecting the culture. The culture can be fractionated (e.g., to remove cells and/or to obtain fractions enriched in L-methionine).

[0184] In another aspect, the invention features an isolated nucleic acid encoding a variant bacterial 5-methyltetrahydrofolate homocysteine methyltransferase polypeptide. In various embodiments, the variant 5-methyltetrahydrofolate homocysteine methyltransferase polypeptide exhibits reduced feedback inhibition relative to a wild-type form of the 5-methyltetrahydrofolate homocysteine methyltransferase polypeptide. In various embodiments, the nucleic acid encodes a 5-methyltetrahydrofolate homocysteine methyltransferase polypeptide with reduced feedback inhibition by S-adenosylmethionine polypeptide. In various embodiments, the bacterial 5-methyltetrahydrofolate homocysteine methyltransferase polypeptide is chosen from: a Corynebacterium glutamicum 5-methyltetrahydrofolate homocysteine methyltransferase polypeptide, a Mycobacterium smegmatis 5-methyltetrahydrofolate homocysteine methyltransferase polypeptide, a Thermobifida fusca 5-methyltetrahydrofolate homocysteine methyltransferase polypeptide, an Amycolatopsis mediterranei 5-methyltetrahydrofolate homocysteine methyltransferase polypeptide, a Streptomyces coelicolor 5-methyltetrahydrofolate homocysteine methyltransferase polypeptide, an Erwinia chrysanthemi 5-methyltetrahydrofolate homocysteine methyltransferase polypeptide, a Shewanella oneidensis 5-methyltetrahydrofolate homocysteine methyltransferase polypeptide, a Mycobacterium tuberculosis 5-methyltetrahydrofolate homocysteine methyltransferase polypeptide, an Escherichia coli 5-methyltetrahydrofolate homocysteine methyltransferase polypeptide, a Corynebacterium acetoglutamicum 5-methyltetrahydrofolate homocysteine methyltransferase polypeptide, a Corynebacterium melassecola 5-methyltetrahydrofolate homocysteine methyltransferase polypeptide, a Corynebacterium thermoaminogenes 5-methyltetrahydrofolate homocysteine methyltransferase polypeptide, a Brevibacterium lactofermentum 5-methyltetrahydrofolate homocysteine methyltransferase polypeptide, a Brevibacterium lactis 5-methyltetrahydrofolate homocysteine methyltransferase polypeptide, and a Brevibacterium flavum 5-methyltetrahydrofolate homocysteine methyltransferase polypeptide.

[0185] In another aspect, the invention features an isolated nucleic acid encoding a variant bacterial 5-methyltetrahydrofolate homocysteine methyltransferase polypeptide, wherein the variant 5-methyltetrahydrofolate homocysteine methyltransferase polypeptide is a variant of a 5-methyltetrahydrofolate homocysteine methyltransferase polypeptide including the following amino acid sequence: G₁-X₂ -K₃ -X₄ -X₅-X₆-X₇-X₈-X₉-X₁₀-X₁₁-X₁₂-X₁₃-X₁₃ₐ-X_{13b}-X_{13c}-X_{13d}-X₁₃ₑ-X_{13f}-X_{13g}-X₁₃ₕ-X₁₃ᵢ-X₁₃ⱼ-X₁₃ₖ-X₁₃ₗ-F₁₄-X₁₅-Z₁₆ SEQ ID NO: 362), wherein X is any amino acid, wherein each of X₁₃ₐ-X₁₃ₗ is, independently, any amino acid or absent, and wherein Z₁₆ is selected from valine, aspartate, glycine, isoleucine, and leucine; wherein the variant 5-methyltetrahydrofolate homocysteine methyltransferase polypeptide includes an amino acid change at one or more of G₁, K₃, F₁₄, or Z₁₆, of SEQ ID NO:362. In various embodiments, the amino acid change is a change to an alanine.

[0186] In another aspect, the invention features an isolated nucleic acid encoding a variant bacterial 5-methyltetrahydrofolate homocysteine methyltransferase polypeptide, wherein the variant 5-methyltetrahydrofolate homocysteine methyltransferase polypeptide is a C. glutamicum 5-methyltetrahydrofolate homocysteine methyltransferase polypeptide including an amino acid change in one or more of the following residues of SEQ ID NO:222:

[0187] Glycine 708, Lysine 710, Phenylalanine 725, and Leucine 727. In various embodiments, the amino acid change is a change to an alanine.

[0188] The invention also features a polypeptide encoded by the nucleic acid encoding a variant bacterial 5-methyltetrahydrofolate homocysteine methyltransferase.

[0189] The invention also features a bacterium including a nucleic acid encoding a variant bacterial 5-methyltetrahydrofolate homocysteine methyltransferase polypeptide. In various embodiments, the bacterium is a coryneform bacterium. The bacterium can further comprise one or more nucleic acids encoding other variant bacterial polypeptides (e.g., variant bacterial polypeptides involved in amino acid production, e.g., variant bacterial polypeptides described herein).

[0190] The invention also features a method for producing L-methionine, the method including: cultivating a genetically modified bacterium including a nucleic acid encoding a variant bacterial 5-methyltetrahydrofolate homocysteine methyltransferase polypeptide under conditions in which the nucleic acid is expressed and that allow L-methionine to be produced, and collecting the culture. The culture can be fractionated (e.g., to remove cells and/or to obtain fractions enriched in L-methionine).

[0191] In another aspect, the invention features an isolated nucleic acid encoding a variant bacterial S-adenosylmethionine synthetase polypeptide. In various embodiments, the variant S-adenosylmethionine synthetase polypeptide exhibits reduced feedback inhibition relative to a wild-type form of the S-adenosylmethionine synthetase polypeptide. In various embodiments, the nucleic acid encodes an S-adenosylmethionine synthetase polypeptide with reduced feedback inhibition by S-adenosylmethionine. In various embodiments, the bacterial S-adenosylmethionine synthetase polypeptide is chosen from: a Corynebacterium glutamicum S-adenosylmethionine synthetase polypeptide, a Mycobacterium smegmatis S-adenosylmethionine synthetase polypeptide, a Thermobifida fusca S-adenosylmethionine synthetase polypeptide, an Amycolatopsis mediterranei S-adenosylmethionine synthetase polypeptide, a Streptomyces coelicolor S-adenosylmethionine synthetase polypeptide, an Erwinia chrysanthemi S-adenosylmethionine synthetase polypeptide, a Shewanella oneidensis S-adenosylmethionine synthetase polypeptide, a Mycobacterium tuberculosis S-adenosylmethionine synthetase polypeptide, an Escherichia coli S-adenosylmethionine synthetase polypeptide, a Corynebacterium acetoglutamicum S-adenosylmethionine synthetase polypeptide, a Corynebacterium melassecola S-adenosylmethionine synthetase polypeptide, a Corynebacterium thermoaminogenes S-adenosylmethionine synthetase polypeptide, a Brevibacterium lactofermentum S-adenosylmethionine synthetase polypeptide, a Brevibacterium lactis S-adenosylmethionine synthetase polypeptide, and a Brevibacterium flavum S-adenosylmethionine synthetase polypeptide.

[0192] In another aspect, the invention features an isolated nucleic acid encoding a variant bacterial S-adenosylmethionine synthetase polypeptide, wherein the variant S-adenosylmethionine synthetase polypeptide is a variant of an S-adenosylmethionine synthetase polypeptide including the following amino acid sequence: G₁-X₂-K₃-X₄₋X₅-X₆-X₇₋X8-X₉-X₁₀-X₁₁-X₁₂-X₁₃-X₁₃ₐ-X_{13b}-X_{13c}-X_{13d}-X₁₃ₑ-X_{13f}-X_{13g}-X₁₃ₕ-X₁₃ᵢ-X₁₃ⱼ-X₁₃ₖ-X₁₃ₗ-F₁₄-X₁₅-Z₁₆-X₁₇-X₁₈-X₁₉-X₂₀-X₂₁-X₂₁ₐ-X_{21b}-X_{21c}-X_{21d}-X₂₁ₑ-X_{21f}-X_{21g}-X₂₁ₕ-X₂₁ᵢ-X₂₁ⱼ-X₂₁ₖ-X₂₁ₗ-X₂₁ₘ-X₂₁ₙ-X₂₁ₒ-X₂₁ₚ-X_{21q}-X₂₁ᵣ-X₂₁ₛ-X₂₁ₜ-D₂₂ (SEQ ID NO:360), wherein each of X₂, X₄-X₁₃, X₁₅, and X₁₇-X₂₀ is, independently, any amino acid,wherein each of X₁₃ₐ-X₁₃ₗ is, independently, any amino acid or absent, wherein each of X₂₁ₐ-X₂₁ₜ is, independently, any amino acid or absent, and wherein Z₁₆ is selected from valine, aspartate, glycine, isoleucine, and leucine; wherein the variant S-adenosylmethionine synthetase polypeptide includes an amino acid change at one or more of G₁, K₃, F₁₄, Z₁₆, or D₂₂ of SEQ ID NO:360. In various embodiments, the amino acid change is a change to an alanine.

[0193] In another aspect, the invention features an isolated nucleic acid encoding a variant bacterial S-adenosylmethionine synthetase polypeptide, wherein the variant S-adenosylmethionine synthetase polypeptide is a C. glutamicum S-adenosylmethionine synthetase polypeptide including an amino acid change in one or more of the following residues of SEQ ID NO:215: Glycine 263, Lysine 265, Phenylalanine 282, Glycine 284, and Aspartate 291.

[0194] In various embodiments, the amino acid change is a change to an alanine.

[0195] The invention also features a polypeptide encoded by a nucleic acid encoding a variant bacterial S-adenosylmethionine synthetase polypeptide.

[0196] The invention also features a bacterium including a nucleic acid encoding a variant bacterial S-adenosylmethionine synthetase polypeptide. In various embodiments, the bacterium is a coryneform bacterium. The bacterium can further comprise one or more nucleic acids encoding other variant bacterial polypeptides (e.g., variant bacterial polypeptides involved in amino acid production, e.g., variant bacterial polypeptides described herein).

[0197] The invention also features a method for producing L-methionine, the method including: cultivating a genetically modified bacterium including a nucleic acid encoding a variant bacterial S-adenosylmethionine synthetase polypeptide under conditions in which the nucleic acid is expressed and that allow L-methionine to be produced, and collecting the culture. The culture can be fractionated (e.g., to remove cells and/or to obtain fractions enriched in L-methionine).

[0198] In another aspect, the invention features an isolated nucleic acid encoding a variant bacterial homoserine kinase polypeptide. In various embodiments, the variant homoserine kinase polypeptide exhibits reduced feedback inhibition relative to a wild-type form of the bacterial homoserine kinase polypeptide. In various embodiments, the nucleic acid encodes a homoserine kinase polypeptide with reduced feedback inhibition by S-adenosylmethionine. In various embodiments, the bacterial homoserine kinase polypeptide is chosen from: a Corynebacterium glutamicum homoserine kinase polypeptide, a Mycobacterium smegmatis homoserine kinase polypeptide, a Thermobifida fusca homoserine kinase polypeptide, an Amycolatopsis mediterranei homoserine kinase polypeptide, a Streptomyces coelicolor homoserine kinase polypeptide, an Erwinia chrysanthemi homoserine kinase polypeptide, a Shewanella oneidensis homoserine kinase polypeptide, a Mycobacterium tuberculosis homoserine kinase polypeptide, an Escherichia coli homoserine kinase polypeptide, a Corynebacterium acetoglutamicum homoserine kinase polypeptide, a Corynebacterium melassecola homoserine kinase polypeptide, a Corynebacterium thermoaminogenes homoserine kinase polypeptide, a Brevibacterium lactofermentum homoserine kinase polypeptide, a Brevibacterium lactis homoserine kinase polypeptide, and a Brevibacterium flavum homoserine kinase polypeptide.

[0199] In another aspect, the invention features an isolated nucleic acid encoding a variant bacterial homoserine kinase polypeptide, wherein the homoserine kinase polypeptide is a C. glutamicum homoserine kinase polypeptide including an amino acid change in one or more of the following residues of SEQ ID NO:364: Glycine 160, Lysine 161, Phenylalanine 186, Alanine 188, and Aspartate 205. In various embodiments, the amino acid change is a change to an alanine, wherein the original residue is other than an alanine.

[0200] The invention also features a polypeptide encoded by the nucleic acid encoding a variant bacterial homoserine kinase.

[0201] The invention also features a bacterium including the nucleic acid encoding a variant bacterial homoserine kinase polypeptide. In various embodiments, the bacterium is a coryneform bacterium. The bacterium can further include one or more nucleic acids encoding other variant bacterial polypeptides (e.g., variant bacterial polypeptides involved in amino acid production, e.g., variant bacterial polypeptides described herein).

[0202] The invention also features a method for producing an amino acid, the method including: cultivating a genetically modified bacterium including the nucleic acid encoding a variant bacterial homoserine kinase polypeptide under conditions in which the nucleic acid is expressed and that allow the amino acid to be produced, and collecting the culture. The culture can be fractionated (e.g., to remove cells and/or to obtain fractions enriched in the amino acid).

[0203] In another aspect, the invention features a bacterium including two or more of the following: a nucleic acid encoding a variant bacterial homoserine O-acetyltransferase polypeptide; a nucleic acid encoding a variant bacterial O-acetylhomoserine sulfhydrylase; a nucleic acid encoding a variant bacterial McbR gene product polypeptide; a nucleic acid encoding a variant bacterial aspartokinase polypeptide; a nucleic acid encoding a variant bacterial O-succinylhomoserine (thiol)-lyase polypeptide; a nucleic acid encoding a variant bacterial cystathione beta-lyase polypeptide; a nucleic acid encoding a variant bacterial 5-methyltetrahydrofolate homocysteine methyltransferase polypeptide; and a nucleic acid encoding a variant bacterial S-adenosylmethionine synthetase polypeptide.

[0204] In various embodiments, the bacterium comprises a nucleic acid encoding a variant bacterial homoserine O-acetyltransferase and a nucleic acid encoding a variant bacterial O-acetylhomoserine sulfhydrylase. In certain embodiments, at least one of the variant bacterial polypeptides have reduced feedback inhibition (e.g., relative to a wild-type form of the polypeptide).

[0205] In another aspect, the invention features a bacterium including two or more of the following: (a) a nucleic acid encoding a variant bacterial homoserine O-acetyltransferase polypeptide, wherein the variant homoserine O-acetyltransferase polypeptide is a variant of a homoserine O-acetyltransferase polypeptide including the following amino acid sequence: G₁-X-X₂-X₃-X₄-X₅-X₆-X₇-X₈-X₉-X₁₀-X₁₁-X₁₂-X₁₃-X₁₃ₐ-X_{13b}-X_{13c}-X_{13d}-X₁₃ₑ-X_{13f}-X_{13g}-X₁₃ₕ-X₁₃ᵢ-X₁₃ⱼ-X₁₃ₖ-X₁₃ₗ-F₁₄-X₁₅-Z₁₆-X₁₇-X₁₈-X₁₉-X₂₀-X₂₁-X₂₁ₐ-X_{21b}-X_{21c}-X_{21d}-X₂₁ₑ-X_{21f}-X_{21g}-X₂₁ₕ-X₂₁ᵢ-X₂₁ⱼ-X₂₁ₖ-X₂₁ₗ-X₂₁ₘ-X₂₁ₙ-X₂₁ₒ-X₂₁ₚ-X_{21q}-X₂₁ᵣ-X₂₁ₛ-X₂₁ₜ-D₂₂ (SEQ ID NO:360), wherein each of X₂, X₄-X₁₃, X₁₅, and X₁₇-X₂₀ is, independently, any amino acid, wherein each of X₁₃ₐ-X₁₃ₗ is, independently, any amino acid or absent, wherein each of X₂₁ₐ-X₂₁ₜ is, independently, any amino acid or absent, and wherein Z₁₆ is selected from valine, aspartate, glycine, isoleucine, and leucine; wherein the variant homoserine O-acetyltransferase polypeptide includes an amino acid change at one or more of G₁, K₃, F₁₄, Z₁₆, or D₂₂ of SEQ ID NO:360; (b) a nucleic acid encoding a variant bacterial O-acetylhomoserine sulfhydrylase polypeptide, wherein the variant O-acetylhomoserine sulfhydrylase polypeptide is a variant of an O-acetylhomoserine sulfhydrylase polypeptide including the following amino acid sequence: G₁-X₂-K₃-X₄-X₅-X₆-X₇-X₈-X₉-X₁₀-X₁₁-X₁₂-X₁₃-X₁₃ₐ-X_{13b}-X_{13c}-X_{13d}-X₁₃ₑ-X_{13f}-X_{13g}-X₁₃ₕ-X₁₃ᵢ-X₁₃ⱼ-X₁₃ₖ-X₁₃ₗ-F₁₄-X₁₅-Z₁₆-X₁₇-X₁₈-X₁₉-X₂₀-X₂₁-X₂₁ₐ-X_{21b}-X_{21c}-X_{21d}-X₂₁ₑ-X_{21f}-X_{21g}-X₂₁ₕ-X₂₁ᵢ-X₂₁ⱼ-X₂₁ₖ-X₂₁ₗ-X₂₁ₘ-X₂₁ₙ-X₂₁ₒ-X₂₁ₚ-X_{21q}-X₂₁ᵣ-X₂₁ₛ-X₂₁ₜ-D₂₂ (SEQ ID NO:360), wherein each of X₂, X₄-X₁₃, X₁₅, and X₁₇-X₂₀ is, independently, any amino acid, wherein each of X₁₃ₐ-X₁₃ₗ is, independently, any amino acid or absent, wherein each of X₂₁ₐ-X₂₁ₜ is, independently, any amino acid or absent, and wherein Z₁₆ is selected from valine, aspartate, glycine, isoleucine, and leucine; wherein the variant O-acetylhomoserine sulfhydrylase polypeptide includes an amino acid change at one or more of G₁, K₃, F₁₄, Z₁₆, or D₂₂ of SEQ ID NO:360; and (c) a nucleic acid encoding a variant bacterial O-acetylhomoserine sulfhydrylase polypeptide, wherein the variant O-acetylhomoserine sulfhydrylase polypeptide is a variant of a O-acetylhomoserine sulfhydrylase polypeptide including the following amino acid sequence: L₁-X₂-X₃-G₄-G₅-X₆-F₇-X₈-X₉-X₁₀-X₁₁ (SEQ ID NO:361), wherein X is any amino acid, wherein X₈ is selected from valine, leucine, isoleucine, and aspartate, and wherein X₁₁₁ is selected from valine, leucine, isoleucine, phenylalanine, and methionine; wherein the variant of the bacterial protein includes an amino acid change at one or more of L₁, G₄, X₈, X₁₁ of SEQ ID NO:361.

[0206] In another aspect, the invention features a bacterium including two or more of the following: (a) a nucleic acid encoding a variant bacterial homoserine O-acetyltransferase polypeptide, wherein the variant homoserine O-acetyltransferase polypeptide is a C. glutamicum homoserine O-acetyltransferase polypeptide including an amino acid change in one or more of the following residues of SEQ ID NO:212: Glycine 231, Lysine 233, Phenylalanine 251, and Valine 253; (b) a nucleic acid encoding a variant bacterial homoserine O-acetyltransferase polypeptide, wherein the variant homoserine O-acetyltransferase polypeptide is a T. fusca homoserine O-acetyltransferase polypeptide including an amino acid change in one or more of the following residues of SEQ ID NO:24: Glycine 81, Aspartate 287, Phenylalanine 269; (c) a nucleic acid encoding a variant bacterial homoserine O-acetyltransferase polypeptide, wherein the variant homoserine O-acetyltransferase polypeptide is an E. coli homoserine O-acetyltransferase polypeptide including an amino acid change at Glutamate 252 of SEQ ID NO:213; (d) a nucleic acid encoding a variant bacterial homoserine O-acetyltransferase polypeptide, wherein the variant homoserine O-acetyltransferase polypeptide is a mycobacterial homoserine O-acetyltransferase polypeptide including an amino acid change in a residue corresponding to one or more of the following residues of M. leprae homoserine O-acetyltransferase polypeptide set forth in SEQ ID NO:23: Glycine 73, Aspartate 278, and Tyrosine 260; (e) a nucleic acid encoding a variant bacterial homoserine O-acetyltransferase polypeptide, wherein the variant homoserine O-acetyltransferase polypeptide is an M. tuberculosis homoserine O-acetyltransferase polypeptide including an amino acid change in one or more of the following residues of SEQ ID NO:22: Glycine 73, Tyrosine 260, and Aspartate 278; (f) a nucleic acid encoding a variant bacterial O-acetylhomoserine sulfhydrylase polypeptide, wherein the variant O-acetylhomoserine sulfhydrylase polypeptide is a C. glutamicum O-acetylhomoserine sulfhydrylase polypeptide including an amino acid change in one or more of the following residues of SEQ ID NO:214: Glycine 227, Leucine 229, Aspartate 231, Glycine 232, Glycine 233, Phenylalanine 235, Aspartate 236, Valine 239, Phenylalanine 368, Aspartate 370, Aspartate 383, Glycine 346, and Lycine 348; and (g) a nucleic acid encoding a variant bacterial O-acetylhomoserine sulfhydrylase polypeptide, wherein the variant O-acetylhomoserine sulfhydrylase polypeptide is a T. fusca O-acetylhomoserine sulfhydrylase polypeptide including an amino acid change in one or more of the following residues of SEQ ID NO:25: Glycine 240, Aspartate 244, Phenylalanine 379, and Aspartate 394.

[0207] In another aspect, the invention features a bacterium including a nucleic acid encoding an episomal homoserine O-acetyltransferase polypeptide and an episomal O-acetylhomoserine sulfhydrylase polypeptide. In various embodiments, the bacterium is a Corynebacterium. In various embodiments, the episomal homoserine O-acetyltransferase polypeptide and the episomal O-acetylhomoserine sulfhydrylase polypeptide are of the same species as the bacterium (e.g., both are of C. glutamicum). In various embodiments, the episomal homoserine O-acetyltransferase polypeptide and the episomal O-acetylhomoserine sulfhydrylase polypeptide are of a different species than the bacterium. In various embodiments, the episomal homoserine O-acetyltransferase polypeptide is a variant of a bacterial homoserine O-acetyltransferase polypeptide with reduced feedback inhibition relative to a wild-type form of the homoserine O-acetyltransferase polypeptide. In various embodiments, the O-acetylhomoserine sulfhydrylase polypeptide is a variant of a bacterial O-acetylhomoserine sulfhydrylase polypeptide with reduced feedback inhibition relative to a wild-type form of the O-acetylhomoserine sulfhydrylase polypeptide.

[0208] “Aspartic acid family of amino acids and related metabolites” encompasses L-aspartate, β-aspartyl phosphate, L-aspartate-β-semialdehyde, L-2,3-dihydrodipicolinate, L-Δ¹-piperideine-2,6-dicarboxylate, N-succinyl-2-amino-6-keto-L-pimelate, N-succinyl-2, 6-L, L-diaminopimelate, L, L-diaminopimelate, D, L-diaminopimelate, L-lysine, homoserine, O-acetyl-L-homoserine, O-succinyl-L-homoserine, cystathionine, L-homocysteine, L-methionine, S-adenosyl-L-methionine, O-phospho-L-homoserine, threonine, 2-oxobutanoate, (S)-2-aceto-2-hydroxybutanoate, (S)-2-hydroxy-3-methyl-3-oxopentanoate, (R)-2,3-Dihydroxy-3-methylpentanoate, (R)-2-oxo-3-methylpentanoate, L-isoleucine, L-asparagine. In various embodiments the aspartic acid family of amino acids and related metabolites encompasses aspartic acid, asparagine, lysine, threonine, methionine, isoleucine, and S-adenosyl-L-methionine. A polypeptide or functional variant thereof with “reduced feedback inhibition” includes a polypeptide that is less inhibited by the presence of an inhibitory factor as compared to a wild-type form of the polypeptide or a polypeptide that is less inhibited by the presence of an inhibitory factor as compared to the corresponding endogenous polypeptide expressed in the organism into which the variant has been introduced. For example, a wild-type aspartokinase from E. coli or C. glutamicum may have 10-fold less activity in the presence of a given concentration of lysine, or lysine plus threonine, respectively. A variant with reduced feedback inhibition may have, for example, 5-fold less, 2-fold less, or wild-type levels of activity in the presence of the same concentration of lysine.

[0209] A “functional variant” protein is a protein that is capable of catalyzing the biosynthetic reaction catalyzed by the wild-type protein in the case where the protein is an enzyme, or providing the same biological function of the wild-type protein when that protein is not catalytic. For instance, a functional variant of a protein that normally regulates the transcription of one or more genes would still regulate the transcription of one or more of the same genes when transformed into a bacterium. In certain embodiments, a functional variant protein is at least partially or entirely resistant to feedback inhibition by an amino acid. In certain embodiments, the variant has fewer than 20, 15, 10, 9, 8, 7, 6, 5, 4, 3, or 1 amino acid changes compared to the wild-type protein. In certain embodiments, the amino acid changes are conservative changes. A variant sequence is a nucleotide or amino acid sequence corresponding to a variant polypeptide, e.g., a functional variant polypeptide.

[0210] An amino acid that is “corresponding” to an amino acid in a reference sequence occupies a site that is homologous to the site in the reference sequence. Corresponding amino acids can be identified by alignment of related sequences.

[0211] As used herein, a “heterologous” nucleic acid or protein is meant to encompass a nucleic acid or protein, or functional variant of a nucleic acid or protein, of an organism (species) other than the host organism (species) used for the production of members of the aspartic acid family of amino acids and related metabolites. In certain embodiments, when the host organism is a coryneform bacteria the heterologous gene will not be obtained from E. coli. In other specific embodiments, when the host organism is E. coli the heterologous gene will not be obtained from a coryneform bacteria.

[0212] “Gene”, as used herein, includes coding, promoter, operator, enhancer, terminator, co-transcribed (e.g., sequences from an operon), and other regulatory sequences associated with a particular coding sequence.

[0213] As used herein, a “homologous” nucleic acid or protein is meant to encompass a nucleic acid or protein, or functional variant of a nucleic acid or protein, of an organism that is the same species as the host organism used for the production of members of the aspartic acid family of amino acids and related metabolites.

[0214] As known to those skilled in the art, certain substitutions of one amino acid for another may be tolerated at one or more amino acid residues of a wild-type enzyme without eliminating the activity or function of the enzyme. As used herein, the term “conservative substitution” refers to the exchange of one amino acid for another in the same conservative substitution grouping in a protein sequence. Conservative amino acid substitutions are known in the art and are generally based on the relative similarity of the amino acid side-chain substituents, for example, their hydrophobicity, hydrophilicity, charge, size, and the like. In one embodiment, conservative substitutions typically include substitutions within the following groups: Group 1: glycine, alanine, and proline; Group 2: valine, isoleucine, leucine, and methionine; Group 3: aspartic acid, glutamic acid, asparagine, glutamine; Group 4: serine, threonine, and cysteine; Group 5: lysine, arginine, and histidine; Group 6: phenylalanine, tyrosine, and tryptophan. Each group provides a listing of amino acids that may be substituted in a protein sequence for any one of the other amino acids in that particular group.

[0215] There are several criteria used to establish groupings of amino acids for conservative substitution. For example, the importance of the hydropathic amino acid index in conferring interactive biological function on a protein is generally understood in the art (Kyte and Doolittle, Mol. Biol. 157:105-132 (1982). It is known that certain amino acids may be substituted for other amino acids having a similar hydropathic index or score and still retain a similar biological activity. Amino acid hydrophilicity is also used as a criterion for the establishment of conservative amino acid groupings (see, e.g., U.S. Patent No. 4,554,101).

[0216] Information relating to the substitution of one amino acid for another is generally known in the art (see, e.g., Introduction to Protein Architecture: The Structural Biology of Proteins, Lesk, A. M., Oxford University Press; ISBN: 0198504748; Introduction to Protein Structure, Branden, C.-I., Tooze, J., Karolinska Institute, Stockholm, Sweden (Jan. 15, 1999); and Protein Structure Prediction: Methods and Protocols (Methods in Molecular Biology), Webster, D. M.(Editor), August 2000, Humana Press, ISBN: 0896036375).

[0217] In some embodiments, the nucleic acid and/or protein sequences of a heterologous sequence and/or host strain gene will be compared, and the homology can be determined. Homology comparisons can be used, for example, to identify corresponding amino acids. The percent identity between the two sequences is a function of the number of identical positions shared by the sequences, taking into account the number of gaps, and the length of each gap, which need to be introduced for optimal alignment of the two sequences. The comparison of sequences and determination of percent identity between two sequences can be accomplished using a mathematical algorithm. For example, the percent identity between two nucleotide sequences can be determined using the algorithm of Needleman and Wunsch ((1970) J. Mol. Biol. 48:444-453) algorithm which has been incorporated into the GAP program in the GCG software package, using either a Blosum 62 matrix and a gap weight of 12, a gap extend penalty of 4, and a frameshift gap penalty of 5.

[0218] Generally, to determine the percent identity of two nucleic acid or protein sequences, the sequences are aligned for optimal comparison purposes (e.g., gaps can be introduced in one or both of a first and a second nucleic acid or amino acid sequence for optimal alignment and non-homologous sequences can be disregarded for comparison purposes). The length of a test sequence aligned for comparison purposes can be at least 30%, 40%, 50%, 60%, 70%, 80%, 90%, 100% of the length of the reference sequence. The nucleotides or amino acids at corresponding nucleotide or amino acid positions are then compared. When a position in the first sequence is occupied by the same nucleotide or amino acid as the corresponding position in the second sequence, then the molecules are identical at that position (as used herein “identity” is equivalent to “homology”).

[0219] The protein sequences described herein can be used as a “query sequence” to perform a search against a database of non-redundant sequences, for example. Such searches can be performed using the BLASTP and TBLASTN programs (version 2.0) of Altschul, et al. (1990) J. Mol. Biol. 215:403-10. BLAST protein searches can be performed with the BLASTP program, using, for example, the Blosum 62 matrix, a wordlength of 3, and a gap existence cost of 11 and a gap extension penalty of 1. Software for performing BLAST analyses is publicly available through the National Center for Biotechnology Information, and default paramenter can be used. Sequences described herein can also be used as query sequences in TBLASTN searches, using specific or default parameters.

[0220] The nucleic acid sequences described herein can be used as a “query sequence” to perform a search against a database of non-redundant sequences, for example. Such searches can be performed using the BLASTN and BLASTX programs (version 2.0) of Altschul, et al. (1990) J. Mol. Biol. 215:403-10. BLAST nucleotide searches can be performed with the BLASTN program, score=100, wordlength=11 to evaluate identity at the nucleic acid level. BLAST protein searches can be performed with the BLASTX program, score=50, wordlength=3 to evaluate identity at the protein level. To obtain gapped alignments for comparison purposes, Gapped BLAST can be utilized as described in Altschul et al., (1997) Nucleic Acids Res. 25:3389-3402. When utilizing BLAST and Gapped BLAST programs, the default parameters of the respective programs (e.g., BLASTX and BLASTN) can be used. Alignment of nucleotide sequences for comparison can also be conducted, e.g., by the local homology algorithm of Smith & Waterman, Adv. Appl. Math. 2:482 (1981), by the homology alignment algorithm of Needleman & Wunsch, J. Mol. Biol. 48:443 (1970), by the search for similarity method of Pearson & Lipman, Proc. Nat'l. Acad. Sci. USA 85:2444 (1988), by computerized implementations of these algorithms (GAP, BESTFIT, FASTA, and TFASTA in the Wisconsin Genetics Software Package, Genetics Computer Group, 575 Science Dr., Madison, Wis.), or by manual alignment and visual inspection (see, e.g., Current Protocols in Molecular Biology (Ausubel et al., eds. 1995 supplement)).

[0221] Nucleic acid sequences can be analyzed for hybridization properties. As used herein, the term “hybridizes under low stringency, medium stringency, high stringency, or very high stringency conditions” describes conditions for hybridization and washing. Guidance for performing hybridization reactions can be found in Current Protocols in Molecular Biology, John Wiley & Sons, N.Y. (1989), 6.3.1-6.3.6. Aqueous and nonaqueous methods are described in that reference and either can be used. Specific hybridization conditions referred to herein are as follows: 1) low stringency hybridization conditions in 6X sodium chloride/sodium citrate (SSC) at about 45° C., followed by two washes in 0.2×SSC, 0.1% SDS at least at 50° C. (the temperature of the washes can be increased to 55° C. for low stringency conditions); 2) medium stringency hybridization conditions in 6×SSC at about 45° C., followed by one or more washes in 0.2×SSC, 0.1% SDS at 60° C.; 3) high stringency hybridization conditions in 6×SSC at about 45° C., followed by one, two, three, four or more washes in 0.2×SSC, 0.1% SDS at 65° C.) very high stringency hybridization conditions are 0.5M sodium phosphate, 7% SDS at 65° C., followed by one or more washes at 0.2×SSC, 1% SDS at 65° C. Very high stringency conditions (at least 4 or more washes) are the preferred conditions and the ones that should be used unless otherwise specified.

[0222] The details of one or more embodiments of the invention are set forth in the accompanying drawings and the description below. Other features, objects, and advantages of the invention will be apparent from the description and drawings, and from the claims.

### DESCRIPTION OF DRAWINGS

[0223] FIG. 1. is a diagram of the biosynthesis of aspartate amino acid family.

[0224] FIG. 2. is a diagram of the methionine biosynthetic pathway.

[0225] FIG. 3. is a restriction map of plasmid MB3961 (vector backbone plasmid).

[0226] FIG. 4. is a restriction map of plasmid MB4094 (vector backbone plasmid).

[0227] FIG. 5. is a restriction map of plasmid MB4083 (hom-thrB deletion construct).

[0228] FIG. 6. is a restriction map of plasmid MB4084 (thrB deletion construct).

[0229] FIG. 7. is a restriction map of plasmid MB4165 (mcbR deletion construct).

[0230] FIG. 8. is a restriction map of plasmid MB4169 (hom-thrB deletion/gpd-M. smegmatis lysC(T311I)-asd replacement construct).

[0231] FIG. 9. is a restriction map of plasmid MB4192 (hom-thrB deletion/gpd-S. coelicolor hom(G362E) replacement construct.

[0232] FIG. 10. is a restriction map of plasmid MB4276 (pck deletion/gpd-M. smegmatis lysC(T311I)-asd replacement construct).

[0233] FIG. 11. is a restriction map of plasmid MB4286 (mcbR deletion/trcRBS-T. fusca metA replacement construct).

[0234] FIG. 12A. is a restriction map of plasmid MB4287 (mcbR deletion/trcRBS-C. glutamicum metA (K233A)-metB replacement construct).

[0235] FIG. 12B. is a depiction of the nucleotide sequence of the DNA sequence in MB4278 (trcRBS-C. glutamicum metA YH) that spans from the trcRBS promoter to the stop of the metH gene.

[0236] FIG. 13 is a graph depicting the results of an assay to determine in vitro O-acetyltransferase activity of C. glutamicum MetA from two C. glutamicum strains, MA-442 and MA-449, in the presence and absence of IPTG.

[0237] FIG. 14 is a graph depicting the results of an assay to determine sensitivity of MetA in C. glutamicum strain MA-442 to inhibition by methionine and S-AM.

[0238] FIG. 15 is a graph depicting the results of an assay to determine the in vitro O-acetyltransferase activity of T. fusca MetA expressed in C. glutamicum strains MA-456, MA570, MA-578, and MA-479. Rate is a measure of the change in OD412 divided by time per nanograms of protein.

[0239] FIG. 16 is a graph depicting the results of an assay to determine in vitro MetY activity of T. fusca MetY expressed in C. glutamicum strains MA-456 and MA-570. Rate is defined as the change in OD412 divided by time per nanograms of protein.

[0240] FIG. 17. is a graph depicting the results of an assay to determine lysine production in C. glutamicum and B. lactofermentum strains expressing heterologous wild-type and mutant lysC variants.

[0241] FIG. 18 is a graph depicting results from an assay to determine lysine and homoserine production in C. glutamicum strain, MA-0331 in the presence and absence of the S. coelicolor hom G362E variant.

[0242] FIG. 19. is a graph depicting results from any assay to determine asparate concentrations in C. glutamicum strains MA-0331 and MA-0463 in the presence and absence of E chrysanthemi ppc.

[0243] FIG. 20 is a graph depicting results from an assay to determine lysine production in C. glutamicum strains MA-0331 and MA-0463 transformed with heterologous wild-type dapA genes.

[0244] FIG. 21 is a graph depicting results from an assay to determine metabolite levels in C. glutamicum strain MA-1378 and its parent strains.

[0245] FIG. 22 is a graph depicting results from an assay to determine homoserine and O-acetylhomoserine levels in C. glutamicum strains MA-0428, MA-0579, MA-1351, MA-1559 grown in the presence or absence of IPTG. IPTG induces expression of the episomal plasmid borne T. fusca metA gene.

[0246] FIG. 23. is a graph depicting results from an assay to determine metabolite levels in C. glutamicum strain MA-1559 and its parent strains.

[0247] FIG. 24 is a graph depicting methionine concentrations in broths from fermentations of two C. glutamicum strains, MA-622, and MA-699, which express a MetA K233A mutant polypeptide. Production by cells cultured in the presence and absence of IPTG is depicted.

[0248] FIG. 25 is a graph depicting methionine concentrations in broths from fermentations of two C. glutamicum strains, MA-622 and MA-699, expressing a MetY D23 1A mutant polypeptide. Production by cells cultured in the presence and absence of IPTG is depicted.

[0249] FIG. 26 is a graph depicting methionine concentrations in broths from fermentations of two C. glutamicum strains, MA-622 and MA-699, expressing a C. glutamicum MetY G232A mutant polypeptide. Production by cells cultured in the presence and absence of IPTG is depicted.

[0250] FIG. 27 is a graph depicting results from an assay to determine metabolite levels in C. glutamicum strains MA-1 906, MA-2028, MA-1 907, and MA-2025. Strains were grown in the presence and absence of IPTG.

[0251] FIG. 28 is a graph depicting results from an assay to determine metabolite levels in C. glutamicum strains MA-1667 and MA-1743. Strains were grown in the presence and absence of IPTG.

[0252] FIG. 29 is a graph depicting results from an assay to determine metabolite levels in C. glutamicum strains MA-0569, MA-1688, MA-1421, and MA-1790. Strains were grown in the absence and/or presence of IPTG.

[0253] FIG. 30 is a graph depicting results from an assay to determine metabolite levels in C. glutamicum strain MA-1 668 and its parent strains.

### DETAILED DESCRIPTION

[0254] The invention provides nucleic acids and modified bacteria that comprise nucleic acids encoding proteins that improve fermentative production of aspartate-derived amino acids and intermediate compounds. In particular, nucleic acids and bacteria relevant to the production of L-aspartate, L-lysine, L-methionine, S-adenosyl-L-methionine, threonine, L-isoleucine, homoserine, O-acetyl homoserine, homocysteine, and cystathionine are disclosed. The nucleic acids include genes that encode metabolic pathway proteins that modulate the biosynthesis of these amino acids, intermediates, and related metabolites either directly (e.g., via enzymatic conversion of intermediates) or indirectly (e.g., via transcriptional regulation of enzyme expression or regulation of amino acid export). The nucleic acid sequences encoding the proteins can be derived from bacterial species other than the host organism (species) used for the production of members of the aspartic acid family of amino acids and related metabolites. The invention also provides methods for producing the bacteria and the amino acids, including the production of amino acids for use in animal feed additives.

[0255] Modification of the sequences of certain bacterial proteins involved in amino acid production can lead to increased yields of amino acids. Regulated (e.g., reduced or increased) expression of modified or unmodified (e.g., wild type) bacterial enzymes can likewise enhance amino acid production. The methods and compositions described herein apply to bacterial proteins that regulate the production of amino acids and related metabolites, (e.g., proteins involved in the metabolism of methionine, threonine, isoleucine, aspartate, lysine, cysteine and sulfur), and nucleic acids encoding these proteins. These proteins include enzymes that catalyze the conversion of intermediates of amino acid biosynthetic pathways to other intermediates and/or end product, and proteins that directly regulate the expression and/or function of such enzymes. Target proteins for manipulation include those enzymes that are subject to various types of regulation such as repression, attenuation, or feedback-inhibition. Amino acid biosynthetic pathways in bacterial species, information regarding the proteins involved in these pathway, links to sequences of these proteins, and other related resources for identifying proteins for manipulation and/or expression as described herein can be accessed through linked databases described by Error! Hyperlink reference not valid.Bono et al., Genome Research, 8:203-210, 30 1998.

[0256] Strategies to manipulate the efficiency of amino acid biosynthesis for commercial production include overexpression, underexpression (including gene disruption or replacement), and conditional expression of specific genes, as well as genetic modification to optimize the activity of proteins. It is possible to reduce the sensitivity of biosynthetic enzymes to inhibitory stimuli, e.g., feedback inhibition due to the presence of biosynthetic pathway end products and intermediates. For example, strains used for commercial production of lysine derived from either coryneform bacteria or Escherichia coli typically display relative insensitivity to feedback inhibition by lysine. Useful coryneform bacterial strains are also relatively resistant to inhibition by threonine. Novel methods and compositions described herein result in enhanced amino acid production. While not bound by theory, these methods and compositions may result in enzymes that are enhanced due to reduced feedback inhibition in the presence of S-adenosylmethionine (S-AM) and/or methionine. Exemplary target genes for manipulation are bacterial dapA, hom, thrB, ppc, pyc, pck, metE, glyA, metA, metY, mcbR, lysC, asd, metB, metC, metH, and metK genes. These target genes can be manipulated individually or in various combinations.

[0257] In certain embodiments, it is useful to engineer strains such that the activity of particular genes is reduced (e.g., by mutation or deletion of an endogenous gene). For example, stains with reduced activity of one or more of hom, thrB, pck, or mcbR gene products can exhibit enhanced production of amino acids and related intermediates.

[0258] Two central carbon metabolism enzymes that direct carbon flow towards the aspartic acid family of amino acids and related metabolites include phosphoenolpyruvate carboxylase (Ppc) and pyruvate carboxylase (Pyc). The initial steps of biosynthesis of aspartatic acid family amino acids are diagrammed in FIG. 1. Both enzymes catalyze the formation of oxaloacetate, a tricarboxylic acid (TCA) cycle component that is transaminated to aspartic acid. Aspartokinase (which is encoded by lysC in coryneform bacteria) catalyzes the first enzyme reaction in the aspartic acid family of amino acids, and is known to be regulated by both feedback-inhibition and repression. Thus, deregulation of this enzyme is critical for the production of any of the commercially important amino acids and related metabolites of the aspartic acid amino acid pathway (e.g. aspartic acid, asparagine, lysine, methionine, S-adenosyl-L-methionine, threonine, and isoleucine). As critical enzymes for regulating carbon flow towards amino acids derived from aspartate, overexpression (by increasing copy number and/or the use of strong promoters) and/or deregulation of each or both of these enzymes can enhance production of the amino acids listed above.

[0259] Other biosynthetic enzymes can be employed to enhance production of specific amino acids. Examples of enzymes involved in L-lysine biosynthesis include: dihydrodipicolinate synthase (DapA), dihydrodipicolinate reductase (DapB), diaminopimelate dehydrogenase (Ddh), and diaminopimelate decarboxylase (LysA). A list of enzymes involved in lysine biosynthesis is provided in Table 1. Overexpression and/or deregulation of each of these enzymes can enhance production of lysine. Overexpression of biosynthetic enzymes can be achieved by increasing copy number of the gene of interest and/or operably linking the gene to apromoter optimal for expression, e.g., a strong or conditional promoter.

[0260] Lysine productivity can be enhanced in strains overexpressing general and specific regulatory enzymes. Specific amino acid substitutions in aspartokinase and dihydrodipicolinate synthase in E. coli can lead to increased lysine production by reducing feedback inhibition. Enhanced expression of lysC and/or dapA (either wild-type or feedback-insensitive alleles) can. ncrease lysine production. Similarly, deregulated alleles of heterologous lysC and dapA genes can be expressed in a strain of coryneform bacteria such as Corynebacterium glutamicum. Likewise, overexpression of eitherpyc or ppc can enhance lysine production.

TABLE 1
Genes and enzymes involved in lysine biosynthesis

| Gene | Enzyme | Comment |
|---|---|---|
| Pyc | Pyruvate Carboxylase | Anaplerotic reaction |
| Ppc | Phosphoenolpyruvate | Anaplerotic reaction |
| | Carboxylase | |
| AspC | Aspartate | Converts OAA to Aspartic acid. |
| | Aminotransferase | |
| LysC | Aspartate Kinase | Depending upon source species, |
| | (III) | feedback-inhibited by lysine |
| | | or lysine plus threonine, and |
| | | in some strains, repressed by |
| | | lysine. |
| Asd | Aspartic Semialdehyde | |
| | Dehydrogenase | |
| Hom | Homoserine | Key branch-point between lysine |
| | Dehydrogenase | and methionine/threonine. |
| DapA | Dihydrodipicolinate | Catalyzes first committed step |
| | Synthase | in lysine biosynthesis. Is |
| | | inhibited by lysine in E. coli. |
| DapB | Dihydrodipicolinate | |
| | Reductase | |
| DapC | N-succinyl-LL- | |
| | diaminopimelate | |
| | Aminotransferase | |
| DapD | Tetrahydrodipicolinate | |
| | N-Succinyltransferase | |
| DapE | N-succinyl-LL- | |
| | diaminopimelate | |
| | Desuccinylase | |
| DapF | Diaminopimelate | |
| | Epimerase | |
| LysA | Diaminopimelate | Last step in lysine biosynthesis |
| | Decarboxylase | |
| Ddh | Diaminopimelate | Redundant one-step pathway for |
| | Dehydrogenase | converting tetrahydrodipicolinate |
| | | to meso-diaminopimelate in |
| | | Corynebacteria |

[0261] Steps in the biosynthesis of methionine are diagrammed in FIG. 2. Examples of enzymes that regulate methionine biosynthesis include: Homoserine dehydrogenase (Hom), O-homoserine acetyltransferase (MetA), and O-acetylhomoserine sulfhydrylase (MetY). Overexpression (by increasing copy number of the gene of interest and/or through the use of strong promoters) and/or deregulation of each of these enzymes can enhance production of methionine.

[0262] Methionine adenosyltransferase (MetK) catalyzes the production of S-adenosyl-L-methionine from methionine. Reduction of metK-expressed enzyme activity can prevent the conversion of methionine to S-adenosyl-L-methionine, thus enhancing the yield of methionine from bacterial strains. Conversely, if one wanted to enhance carbon flow from methionine to S-adenosyl-L-methionine, the metK gene could be overexpressed or desensitized to feedback inhibition.

Bacterial Host Strains

[0263] Suitable host species for the production of amino acids include bacteria of the family Enterobacteriaceae such as an Escherichia coli bacteria and strains of the genus Corynebacterium. The list below contains examples of species and strains that can be used as host strains for the expression of heterologous genes and the production of amino acids.
[0264] Escherichia coli W3110 F⁻ IN(rrnD-rrnE)1 λ⁻ (E. coli Genetic Stock Center)
[0265] Corynebacterium glutamicum ATCC (American Type Culture Collection) 13032
[0266] Corynebacterium glutamicum ATCC 21526
[0267] Corynebacterium glutamicum ATCC 21543
[0268] Corynebacterium glutamicum ATCC 21608
[0269] Corynebacterium acetoglutamicum ATCC 15806
[0270] Corynebacterium acetoglutamicum ATCC 21491
[0271] Corynebacterium acetoglutamicum NRRL B-11473
[0272] Corynebacterium acetoglutamicum NRRL B-11475
[0273] Corynebacterium acetoacidophilum ATCC 13870
[0274] Corynebacterium melassecola ATCC 17965
[0275] Corynebacterium thermoaminogenes FERM BP-1539
[0276] Brevibacterium lactis
[0277] Brevibacterium lactofermentum ATCC 13869
[0278] Brevibacterium lactofermentum NRRL B-1 1470
[0279] Brevibacterium lactofermentum NRRL B-1 1471
[0280] Brevibacterium lactofermentum ATCC 21799
[0281] Brevibacterium lactofermentum ATCC 31269
[0282] Brevibacterium flavum ATCC 14067
[0283] Brevibacterium flavum ATCC 21269
[0284] Brevibacterium flavum NRRL B-11472
[0285] Brevibacterium flavum NRRL B-11474
[0286] Brevibacterium flavum ATCC 21475
[0287] Brevibacterium divaricatum ATCC 14020
   Bacteria Strain for Use a Source of Useful Gene

[0288] Suitable species and strains for heterologous bacterial genes include, but are not limited to, these listed below.
[0289] Mycobacterium smegmatis ATCC 700084
[0290] Amycolatopsis mediterranei
[0291] Streptomyces coelicolor A3(2)
[0292] Thermobifida fusca ATCC 27730
[0293] Erwinia chrysanthemi ATCC 11663
[0294] Shewanella oneidensis
[0295] Mycobacterium leprae
[0296] Mycobacterium tuberculosis H37Rv
[0297] Lactobacillus plantarum ATCC 8014
[0298] Bacillus sphaericus

[0299] Amino acid sequences of exemplary proteins, which can be used to enhance amino acid production, are provided in Table 16. Nucleotide sequences encoding these proteins are provided in Table 17. The sequences that can be expressed in a host strain are not limited to those sequences provided by the Tables.

[0300] Aspartokinases

[0301] Aspartokinases (also referred to as aspartate kinases) are enzymes that catalyze the first committed step in the biosynthesis of aspartic acid family amino acids. The level and activity of aspartokinases are typically regulated by one or more end products of the pathway (lysine or lysine plus threonine depending upon the bacterial species), both through feedback inhibition (also referred to as allosteric regulation) and transcriptional control (also called repression). Bacterial homologs of coryneform and E. coli aspartokinases can be used to enhance amino acid production. Coryneform and E. coli aspartokinases can be expressed in heterologous organisms to enhance amino acid production.

[0302] Homologs of the LysCprotein from Coryneform bacteria

[0303] In Coryneform bacteria, aspartokinase is encoded by the lysC locus. The lysC locus contains two overlapping genes, lysC alpha and lysC beta. LysC alpha and lysC beta code for the 47- and 18-kD subunits of aspartokinase, respectively. A third open-reading frame is adjacent to the lysC locus, and encodes aspartate semialdehyde dehydrogenase (asd). The asd start codon begins 24 base-pairs downstream from the end of the lysC open-reading frame, is expressed as part of the lysC operon.

[0304] The primary sequence of aspartokinase proteins and the structure of the lysC loci are conserved across several members of the order Actinomycetales. Examples of organisms that encode both an aspartokinase and an aspartate semialdehyde dehydrogenase that are highly related to the proteins from coryneform bacteria include Mycobacterium smegmatis, Amycolatopsis mediterranei, Streptomyces coelicolor A3(2), and Thermobifida fusca. In some instances these organisms contain the lysC and asd genes arranged as in coryneform bacteria. Table 2 displays the percent identity of proteins from these Actinomycetes to the C. glutamicum aspartokinase and aspartate semialdehyde dehydrogenase proteins.

TABLE 2
Percent Identity of Heterologous Aspartokinase and Aspartate
Semialdehyde Dehydrogenase Proteins to C. glutamicum Proteins

| | Aspartokinase | Aspartate Semialdehyde |
|---|---|---|
| | (% Identity to | Dehydrogenase (% Identity |
| Organism | C. glutamicum LysC) | to C. glutamicum Asd) |
| Mycobacterium | 73 | 68 |
| smegmatis | | |
| Amycolatopsis | 73 | 62 |
| mediterranei | | |
| Streptomyces | 64 | 50 |
| coelicolor | | |
| Thermobifida | 64 | 48 |
| fusca | | |

[0305] Isolates of source strains such as Mycobacterium smegmatis, Amycolatopsis mediterranei, Streptomyces coelicolor, and Thermobifida fusca are available. The lysC operons can be amplified from genomic DNA prepared from each source strain, and the resulting PCR product can be ligated into an E. coli/C. glutamicum shuttle vector. The homolog of the aspartokinase enzyme from the source strain can then be introduced into a host strain and expressed.

[0306] E. coli Aspartokinase III Homologs

[0307] In coryneform bacteria there is concerted feedback inhibition of aspartokinase by lysine and threonine. This is in contrast to E. coli, where there are three distinct aspartokinases that are independently allosterically regulated by lysine, threonine, or methionine. Homologs of the E. coli aspartokinase III (and other isoenzymes) can be used as an alternative source of deregulated aspartokinase proteins. Expression of these enzymes in coryneform bacteria may decrease the complexity of pathway regulation. For example, the aspartokinase III genes are feedback-inhibited only by lysine instead of lysine and threonine. Therefore, the advantages of expressing feedback-resistant alleles of aspartokinase III alleles include: (1) the increased likelihood of complete deregulation; and (2) the possible removal of the need for constructing either “leaky” mutations in hom or threonine auxotrophs that need to be supplemented. These features can result in decreased feedback inhibition by lysine.

[0308] Genes encoding aspartokinase III isoenzymes can be isolated from bacteria that are more distantly related to Corynebacteria than the Actinomycetes described above. For example, the E. chysanthemi and S. oneidensis gene products are 77% and 60% identical to the E. coli lysC protein, respectively (and 26% and 35% identical to C. glutamicum LysC). The genes coding for aspartokinase III, or functional variants therof, from the non-Escherichia bacteria, Erwinia chrysanthemi and Shewanella oneidensis can be amplified and ligated into the appropriate shuttle vector for expression in C. glutamicum.

[0309] Construction of Deregulated Aspartokinase Alleles

[0310] Lysine analogs (e.g. S-(2-aminoethyl)cysteine (AEC)) or high concentrations of lysine (and/or threonine) can be used to identify strains with enhanced production of lysine. A significant portion of the known lysine-resistant strains from both C. glutamicum and E. coli contain mutations at the lysC locus. Importantly, specific amino acid substitutions that confer increased resistance to AEC have been identified, and these substitutions map to well-conserved residues. Specific amino acid substitutions that result in increased lysine productivity, at least in wild-type strains, include, but are not limited to, those listed in Table 3. In many instances, several useful substitutions have been identified at a particular residue. Furthermore, in various examples, strains have been identified that contain more than one lysC mutation. Sequence alignment confirms that the residues previously associated with feedback-resistance (i.e. AEC-resistance) are conserved in a variety of aspartokinase proteins from distantly related bacteria.

TABLE 3
Amino Acid Substitutions That Release
Aspartokinase Feedback Inhibition.

| | Amino Acid |
|---|---|
| Organism | Substitution |
| Corynebacterium glutamicum (or related species) | Ala 279 [symbol] Pro |
| ″ | Ser 301 [symbol] Tyr |
| ″ | Thr 311 [symbol] Ile |
| ″ | Gly 345 [symbol] Asp |
| Escherichia coli (many substitutions identified | Gly 323 [symbol] Asp |
| between amino acids 318-325 and 345-352) | |
| Escherichia coli (many substitutions identified | Leu 325 [symbol] Phe |
| between amino acids 318-325 and 345-352) | |
| Escherichia coli (many substitutions identified | Ser 345 [symbol] Ile |
| between amino acids 318-325 and 345-352) | |
| Escherichia coli (many substitutions identified | Val 347 [symbol] Met |
| between amino acids 318-325 and 345-352) | |

[0311] Standard site-directed mutagenesis techniques can be used to construct aspartokinase variants that are not subject to allosteric regulation. After cloning PCR-amplified lysC or aspartokinase III genes into appropriate shuttle vectors, oligonucleotide-mediated site-directed mutagenesis is use to provide modified alleles that encode substitutions such as those listed in Table 3. Vectors containing either wild-type genes or modified alleles can be be transformed into C. glutamicum alongside control vectors. The resulting transformants can be screened, for example, for lysine productivity, increased resistance to AEC, relative cross-feeding of lysine auxotrophs, or other methods known to those skilled in the art to identify the mutant alleles of most interest. Assays to measure lysine productivity and/or enzyme activity can be used to confirm the screening results and select useful mutant alleles. Techniques such as high pressure liquid chromatography (HPLC) and HPLC-mass spectrometry (MS) assays to quantify levels of members of the aspartic acid family of amino acids and related metabolites are known to those skilled in the art.

[0312] Methods for random generating amino acid substitutions within the lysC coding sequence, through methods such as mutagenenic PCR, can be used. These methods are familiar to those skilled in the art; for example, PCR can be performed using the GeneMorph PCR mutagenesis kit (Stratagene, La Jolla, Calif.) according to manufacturer's instructions to achieve medium and high range mutation frequencies.

[0313] Evaluation of the heterologous enzymes can be carried out in the presence of the LysC, DapA, Pyc, and Ppc proteins that are endogenous to the host strain. In certain instances, it will be helpful to have reagents to specifically assess the functionality of the heterologous biosynthetic proteins. Phenotypic assays for AEC resistance or enzyme assays can be used to confirm function of wild-type and modified variants of heterologous aspartokinases. The function of cloned heterologous genes can be confirmed by complementation of genetically characterized mutants of E. coli or C. glutamicum. Many of the E. coli strains are publicly available from the E. coli Genetic Stock Center (http://cgsc.biology.yale.edu/top.html). C. glutamicum mutants have also been described.

[0314] Dihydrodipicolinate Synthases

[0315] Dihydrodipicolinate synthase, encoded by dapa, is the branch point enzyme that commits carbon to lysine biosynthesis rather than threonine/methionine production. DapA converts aspartate-β-semialdehyde to 2,3-dihydrodipicolinate. DapA overexpression has been shown to result in increased lysine production in both E. coli and coryneform bacteria. In E. coli, DapA is allosterically regulated by lysine, whereas existing evidence suggests that C. glutamicum regulation occurs at the level of gene expression. Dihydrodipicolinate synthase proteins are not as well conserved amongst Actinomycetes as compared to LysC proteins.

[0316] Both wild-type and deregulated DapA proteins that are homologous to the C. glutamicum protein or the E. coli DapA protein can be expressed to enhance lysine production. Candidate organisms that can be sources of dapa genes are shown in Table 4. The known sequence from M. tuberculosis or M. ieprae can be used to identify homologous genes from M. smegmatis.

TABLE 4
Percent Identity of Dihydrodipicolinate Synthase Proteins.

| | % Identity to | % Identity to |
|---|---|---|
| Organism | C. glutamicum DapA | E. coli DapA |
| Corynebacterium glutamicum | 100 | 34 |
| Mycobacterium tuberculosis | 59 | 33 |
| H37Rv * | | |
| Streptomyces coelicolor | 53 | 33 |
| Thermobifida fusca | 48 | 33 |
| Erwinia chrysanthemi | 34 | 81 |

* Can be used for cloning of the M. smegmatis dapA gene.

[0317] Amino acid substitutions that relieve feedback inhibition of E. coli DapA by lysine have been described. Examples of such substitutions are listed in Table 5. Some of the residues that can be altered to relieve feedback inhibition are conserved in all of the candidate DapA proteins (e.g. Leu 88, His 118). This sequence conservation suggests that similar substitutions in the proteins from Actinomycetes may further enhance protein function. Site-directed mutagenesis can be employed to engineer deregulated DapA variants.

[0318] DapA isolates can be tested for increased lysine production using methods described above. For instance, one could distribute a culture of a lysine-requiring bacterium on a growth medium lacking lysine. A population of dapA mutants obtained by site-directed mutagenesis could then be introduced (through transformation or conjugation) into a wild-type coryneform strain, and subsequently spread onto the agar plate containing the distributed lysine auxotroph. A feedback-resistant dapA mutant would overproduce lysine which would be excreted into the growth medium and satisfy the growth requirement of the auxotroph previously distributed on the agar plate. Therefore a halo of growth of the lysine auxotroph around a dapa mutation-containing colony would indicate the presence of the desired feedback-resistant mutation.

TABLE 5
Amino Acid Substitutions in Dihydrodipicolinate
Synthase That Release Feedback Inhibition.

| | Amino Acid Substitution |
|---|---|
| | (using E. coli DapA amino |
| Organism | acid # as reference |
| Glycine max | Asn 80 [symbol] Ile |
| Nicotiana sylvestris | |
| Escherichia coli | Ala 81 [symbol] Val |
| Zea mays | Glu 84 [symbol] Lys |
| Methylobacillus glycogens | Leu 88 [symbol] Phe |
| Escherichia coli | His 118 [symbol] Tyr |

[0319] Pyruvate and Phosphoenolpyruvate Carboxylases

[0320] Pyruvate carboxylase (Pyc) and phosphoenolpyruvate carboxylase (Ppc) catalyze the synthesis of oxaloacetic acid (OAA), the citric acid cycle intermediate that feeds directly into lysine biosynthesis. These anaplerotic reactions have been associated with improved yields of several amino acids, including lysine, and are obviously important to maximize OAA formation. In addition, a variant of the C. glutamicum Pyc protein containing a P458S substitution, has been shown to have increased activity, as demonstrated by increased lysine production. Proline 458 is a highly conserved amino acid position across a broad range of pyruvate carboxylases, including proteins from the Actinomycetes S. coelicolor (amino acid residue 449) and M. smegmatis (amino acid residue 448). Similar amino acid substitutions in these proteins may enhance anaplerotic activity. A third gene, PEP carboxykinase (pck), expresses an enzyme that catalyzes the formation of phosphoenolpyruvate from OAA (for gluconeogenesis), and thus functionally competes with pyc and ppc. Enhancing expression ofpyc and ppc can maximize OAA formation. Reducing or eliminatingpck activity can also improve OAA formation.

[0321] Homoserine Dehydrogenase

[0322] Homoserine dehydrogenase (Hom) catalyzes the conversion of aspartate semialdehyde to homoserine. Hom is feedback-inhibited by threonine and repressed by methionine in coryneform bacteria. It is thought that this enzyme has greater affinity for aspartate semialdehyde than does the competing dihydrodipicolinate synthase (DapA) reaction in the lysine branch, but slight carbon “spillage” down the threonine pathway may still block Hom activity. Feedback-resistant variants of Hom, overexpression of hom, and/or deregulated transcription of hom, or a combination of any of these approaches, can enhance methionine, threonine, isoleucine, or S-adenosyl-L-methionine production. Decreased Hom activity can enhance lysine production. Bifunctional enzymes with homoserine dehydrogenase activity, such as enzymes encoded by E. coli metL (aspartokinase II-homoserine dehydrogenase II) and thrA (aspartokinase 1-homoserine dehydrogenase I), can also be used to enhance amino acid production.

[0323] Targeted amino acid substitutions can be generated either to decrease, but not eliminate, Hom activity or to relieve Hom from feedback inhibition by threonine. Mutations that result in decreased Hom activity are referred to as “leaky” Hom mutations. In the C. glutamicum homoserine dehydrogenase, amino acid residues have been identified that can be mutated to either enhance or decrease Hom activity. Several of these specific amino acids are well-conserved in Hom proteins in other Actinomycetes (see Table 6).

TABLE 6
Amino acid substitutions that result in either “leaky” Hom alleles
or Hom proteins relieved of feedback inhibition by threonine.

| C. | Corresponding amino acid residue from | | |
|---|---|---|---|
| glutamicum | heterologous homoserine dehydrogenase | | |
| residue | M. smegmatis | S. coelicolor | T. fusca |
| Leaky Hom | | | |
| alleles | | | |
| L23F | V10 | L10 | L192 |
| V59A | V46 | V46 | V228 |
| V104I | I90 | I91 | I274 |
| Deregulated | | | |
| Hom alleles | | | |
| G378E | G364 | G362 | G545 |
| K428 | N/a | R412 truncation | R595 truncation |
| truncation | | | |
| hom^{dr}* | N/a | R412 (delete bp | R595 (delete bp |
| | | 1937 → frameshift | 1785 → frameshift |
| | | mutation) | mutation) |

*The hom^{dr} mutation is described on page 11 of WO 93/09225. This mutation is a single base pair deletion at 1964 bp that disrupts the hom^{dr}reading frame at codon 429. This results in a frame shift mutation that induces approximately ten amino acid changes and a premature termination, or truncation, i.e., deletion of approximately the last seven amino acid residues of the polypeptide.

[0324] It is believed that this single base deletion in the carboxy terminus of the hom dr gene radically alters the protein sequence of the carboxyl terminus of the enzyme, changing its conformation in such a way that the interaction of threonine with a binding site is prevented.

[0325] Homoserine O-Acetyltransferase

[0326] Homoserine O-acetyltransferase (MetA) acts at the first committed step in methionine biosynthesis (Park, S. et al., Mol. Cells 8:286-294, 1998). The MetA enzyme catalyzes the conversion of homoserine to O-acetyl-homoserine. MetA is strongly regulated by end products of the methionine biosynthetic pathway. In E. coli, allosteric regulation occurs by both S-AM and methionine, apparently at two separate allosteric sites. Moreover, MetJ and S-AM cause transcriptional repression of metA. In coryneform bacteria, MetA may be allosterically inhibited by methionine and S-AM, similarly to E. coli. MetA synthesis can be repressed by methionine alone. In addition, trifluoromethionine-resistance has been associated with metA in early studies. Reduction of negative regulation by S-AM and methionine can enhance methionine or S-adenosyl-L-methionine production. Increased MetA activity can enhance production of aspartate-derived amino acids such as methionine and S-AM, whereas decreased MetA activity can promote the formation of amino acids such as threonine and isoleucine.

[0327] O-Acetylhomoserine Sulfhydrylase

[0328] O-Acetylhomoserine sulfhydrylase (MetY) catalyzes the conversion of O-acetyl homoserine to homocysteine. MetY may be repressed by methionine in coryneform bacteria, with a 99% reduction in enzyme activity in the presence of 0.5 mM methionine. It is likely that this inhibition represents the combined effect of allosteric regulation and repression of gene expression. In addition, enzyme activity is inhibited by methionine, homoserine, and O-acetylserine. It is possible that S-AM also modulates MetY activity. Deregulated MetY can enhance methionine or S-AM production.

[0329] Homoserine Kinase

[0330] Homoserine kinase is encoded by thrB gene, which is part of the hom-thrB operon. ThrB phosphorylates homoserine. Threonine inhibition of homoserine kinase has been observed in several species. Some studies suggest that phosphorylation of homoserine by homoserine kinase may limit threonine biosynthesis under some conditions. Increased ThrB activity can enhance production of aspartate-derived amino acids such as isoleucine and threonine, whereas decreased ThrB activity can promote the formation of amino acids including, but not limited to, lysine and methionine.

[0331] Methionine Adenosyltransferase

[0332] Methionine adenosyltransferase converts methionine to S-adenosyl-L-methionine (S-AM). Down-regulating methionine adenosyltransferase (MetK) can enhance production of methionine by inhibiting conversion to S-AM. Enhancing expression of metK or activity of MetK can maximize production of S-AM.

[0333] O-Succinylhomoserine (thio)-lyase/O-acetylhomoserine (thio)-lyase O-Succinylhomoserine (thio)-lyase (MetB; also known as cystathionine gamma-synthase) catalyzes the conversion of O-succinyl homoserine or O-acetyl homoserine to cystathionine. Increasing expression or activity of MetB can lead to increased methionine or S-AM.

[0334] Cystathionine Beta-Lyase

[0335] Cystathionine beta-lyase (MetC) can convert cystathionine to homocysteine. Increasing production of homocysteine can lead to increased production of methionine. Thus, increased MetC expression or activity can increase methionine or S-adenosyl-L-methionine production.

[0336] Glutamate Dehydrogenase

[0337] The enzyme glutamate dehydrogenase, encoded by the gdh gene, catalyses the reductive amination of α-ketoglutarate to yield glutamic acid. Increasing expression or activity of glutamate dehydrogenase can lead to increased lysine, threonine, isoleucine, valine, proline, or tryptophan.

[0338] Diaminopimelate Dehydrogenase

[0339] Diaminopimelate dehydrogenase, encoded by the ddh gene in coryneform bacteria, catalyzes the the NADPH-dependent reduction of ammonia and L-2-amino-6-oxopimelate to form meso-2,6-diaminopimelate, the direct precursor of L-lysine in the alternative pathway of lysine biosynthesis. Overexpression of diaminopimelate dehydrogenase can increase lysine production.

[0340] Detergent Sensitivity Rescuer

[0341] Detergent sensitivity rescuer (dtsR1), encoding a protein related to the alpha subunit of acetyl CoA carboxylase, is a surfactant resistance gene. Increasing expression or activity of DtsR1 can lead to increased production of lysine.

[0342] 5-Methyltetrahydrofolate Homocysteine Methyltransferase

[0343] 5-Methyltetrahydrofolate homocysteine methyltransferase (MetH) catalyzes the conversion of homocysteine to methionine. This reaction is dependent on cobalamin (vitamin B12). Increasing MetH expression or activity can lead to increased production of methionine or S-adenosyl-L-methionine.

[0344] 5-Methyltetrahydropteroyltriglutamate-homocysteine Methyltransferase

[0345] 5-Methyltetrahydropteroyltriglutamate-homocysteine methyltransferase (MetE) also catalyzes the conversion of homocysteine to methionine. Increasing MetE expression or activity can lead to increased production of methionine or S-adenosyl-L-methionine.

[0346] Serine Hydroxymethyltransferase

[0347] Increasing serine hydroxymethyltransferase (GlyA) expression or activity can lead to enhanced methionine or S-adenosyl-L-methionine production.

[0348] 5,10-Methylenetetrahydrofolate Reductase

[0349] 5,10-Methylenetetrahydrofolate reductase (MetF) catalyzes the reduction of methylenetetrahydrofolate to methyltetrahydrofolate, a cofactor for homocysteine methylation to methionine. Increasing expression or activity of MetF can lead to increased methionine or S-adenosyl-L-methionine production.

[0350] Serine O-acetyltransferase

[0351] Serine O-acetyltransferase (CysE) catalyzes the conversion of serine to O-acetylserine. Increasing expression or activity of CysE can lead to increased expression of methionine or S-adenosyl-L-methionine.

[0352] D-3-phosphoglycerate Dehydrogenase

[0353] D-3-phosphoglycerate dehydrogenase (SerA) catalyzes the first step in serine biosynthesis, and is allosterically inhibited by serine. Increasing expression or activity of SerA can lead to increased production of methionine or S-adenosyl-L-methionine.

[0354] McbR Gene Product

[0355] The mcbR gene product of C. glutamicum was identified as a putative transcriptional repressor of the TetR-family and may be involved in the regulation of the metabolic network directing the synthesis of methionine in C. glutamicum (Rey et al., J. Biotechnol. 103(1):51-65, 2003). The mcbR gene product represses expression of metY, metK, cysK, cysl, hom, pyk, ssuD, and possibly other genes. It is possible that McbR represses expression in combination with small molecules such as S-AM or methionine. To date, specific alleles of McbR that prevent binding of either S-AM or methionine have not been identified. Reducing expression of McbR, and/or preventing regulation of McbR by S-AM can enhance amino acid production.

[0356] McbR is involved in the regulation of sulfur containing amino acids (e.g., cysteine, methionine). Reduced McbR expression or activity can also enhance production of any of the aspartate family of amino acids that are derived from homoserine (e.g., homoserine, O-acetyl-L-homoserine, O-succinyl-L-homoserine, cystathionine, L-homocysteine, L-methionine, S-adenosyl-L-methionine (S-AM), O-phospho-L-homoserine, threonine, 2-oxobutanoate, (S)-2-aceto-2-hydroxybutanoate, (S)-2-hydroxy-3-methyl-3-oxopentanoate, (R)-2,3-Dihydroxy-3-methylpentanoate, (R)-2-oxo-3-methylpentanoate, and L-isoleucine).

[0357] Lysine Exporter Protein

[0358] Lysine exporter protein (LysE) is a specific lysine translocator that mediates efflux of lysine from the cell. In C. glutamicum with a deletion in the lysE gene, L-lysine can reach an intracellular concentration of more than 1M. (Erdmann, A., et al. J. Gen Microbiol. 139,:3115-3122, 1993). Overexpression or increased activity of this exporter protein can enhance lysine production.

[0359] Efflux Proteins

[0360] A substantial number of bacterial genes encode membrane transport proteins. A subset of these membrane transport protein mediate efflux of amino acids from the cell. For example, Corynebacterium glutamicum express a threonine efflux protein. Loss of activity of this protein leads to a high intracellular accumulation of threonine (Simic et al., J. Bacteriol. 183(18):5317-5324, 2001). Increasing expression or activity of efflux proteins can lead to increased production of various amino acids. Useful efflux proteins include proteins of the drug/metabolite transporter family. The C. glutamicum proteins listed in Table 16 or homologs thereof can be used to increase amino acid production.

Isolation of Bacterial Genes

[0361] Bacterial genes for expression in host strains can be isolated by methods known in the art. See, for example, Sambrook, J., and Russell, D. W. (Molecular Cloning: A Laboratory Manual, 3nd Ed., Cold Spring Harbor Laboratory Press, Cold Spring Harbor, N.Y., 2001) for methods of construction of recombinant nucleic acids. Genomic DNA from source strains can be prepared using known methods (see, e.g., Saito, H. and, Miura, K. Biochim Biophys Acta. 72:619-629, 1963) and genes can be amplified from genomic DNA using PCR (U.S. Pats. 4,683,195 and 4,683,202, Saiki, et al. Science 230:350-1354, 1985).

[0362] DNA primers to be used for the amplification reaction are those complemental to both 3′-terminals of a double stranded DNA containing an entire region or a partial region of a gene of interest. When only a partial region of a gene is amplified, it is necessary to use such DNA fragments as primers to perform screening of a DNA fragment containing the entire region from a chromosomal DNA library. When the entire region gene is amplified, a PCR reaction solution including DNA fragments containing the amplified gene is subjected to agarose gel electrophoresis, and then a DNA fragment is extracted and cloned into a vector appropriate for expression in bacterial systems.

[0363] DNA primers for PCR may be adequately prepared on the basis of, for example, a sequence known in the source strain (Richaud, F. et al., J. Bacteriol. 297,1986). For example, primers that can amplify a region comprising the nucleotide bases coding for the heterologous gene of interest can be used. Synthesis of the primers can be performed by an ordinary method such as a phosphoamidite method (see Tetrahed Lett. 22:1859,1981) by using a commercially available DNA synthesizer (for example, DNA Synthesizer Model 380B produced by Applied Biosystems Inc.). Further, the PCR can be performed by using a commercially available PCR apparatus and Taq DNA polymerase, or other polymerases that display higher fidelity, in accordance with a method designated by the supplier.

Construction of Variant Alleles

[0364] Many enzymes that regulate amino acid production are subject to allosteric feedback inhibition by biosynthetic pathway intermediates or end products. Useful variants of these enzymes can be generated by substitution of residues responsible for feedback inhibition. For example, enzymes such as homoserine O-acetyltransferase (encoded by metA) are feedback-inhibited by S-AM. To generate deregulated variants of homoserine O-acetyltransferase, we identified putative S-AM binding residues within the amino acid sequence of homoserine O-acetyltransferase, and then constructed plasmids to express MetA variants containing specific amino acid substitutions that are predicted to confer increased resistance to allosteric regulation by S-AM. Strains expressing these variants showed increased production of methionine (see Examples, below).

[0365] Additional putative S-AM binding residues in various enzymes include, but are not limited to, those listed in Tables 9 and 10. One or more of the residues in Tables 9 and 10 can be substituted with a non-conservative residue, or with an alanine (e.g., where the wild type residue is other than an alanine). Sequence alignment confirms that the residues potentially associated with feedback-sensitivity to S-AM are conserved in a variety of MetA and MetY proteins from distantly related bacteria.

[0366] Standard site-directed mutagenesis techniques can be used to construct variants that are less sensitive to allosteric regulation. After cloning a PCR-amplified gene or genes into appropriate shuttle vectors, oligonucleotide-mediated site-directed mutagenesis is use to provide modified alleles that encode specific amino acid substitutions. Vectors containing either wild-type genes or modified alleles can be transformed into C. glutamicum, or another suitable host strain, alongside control vectors. The resulting transformants can be screened, for example, for amino acid productivity, increased resistance to feedback inhibition by S-AM, activity of the enzyme of interest, or other methods known to those skilled in the art to identify the variant alleles of most interest. Assays to measure amino acid productivity and/or enzyme activity can be used to confirm the screening results and select useful variant alleles. Techniques such as high pressure liquid chromatography (HPLC) and HPLC-mass spectrometry (MS) assays to quantify levels of amino acids and related metabolites are known to those skilled in the art.

[0367] Methods for generating random amino acid substitutions within a coding sequence, through methods such as mutagenenic PCR, can be used (e.g., to generate variants for screening for reduced feedback inhibition, or for introducing further variation into enhanced variant sequences). For example, PCR can be performed using the GeneMorph® PCR mutagenesis kit (Stratagene, La Jolla, Calif.) according to manufacturer's instructions to achieve medium and high range mutation frequencies. Other methods are also known in the art.

[0368] Evaluation of enzymes can be carried out in the presence of additional enzymes that are endogenous to the host strain. In certain instances, it will be helpful to have reagents to specifically assess the functionality of a biosynthetic protein that is not endogenous to the organism (e.g., an episomally expressed protein). Phenotypic assays for feedback inhibition or enzyme assays can be used to confirm function of wild-type and variants of biosynthetic enzymes. The function of cloned genes can be confirmed by complementation of genetically characterized mutants of the host organism (e.g., the host E. coli or C. glutamicum bacterium). Many of the E. coli strains are publicly available from the E. coli Genetic Stock Center (http://cgsc.biology.yale.edu/top.html). C. glutamicum mutants have also been described.

Expression of Genes

[0369] Bacterial genes can be expressed in host bacterial strains using methods known in the art. In some cases, overexpression of a bacterial gene (e.g., a heterologous and/or variant gene) will enhance amino acid production by the host strain. Overexpression of a gene can be achieved in a variety of ways. For example, multiple copies of the gene can be expressed, or the promoter, regulatory elements, and/or ribosome binding site upstream of a gene (e.g., a variant allele of a gene, or an endogenous gene) can be modified for optimal expression in the host strain. In addition, the presence of even one additional copy of the gene can achieve increased expression, even where the host strain already harbors one or more copies of the corresponding gene native to the host species. The gene can be operably linked to a strong constitutive promoter or an inducible promoter (e.g., trc, lac) and induced under conditions that facilitate maximal amino acid production. Methods to enhance stability of the mRNA are known to those skilled in the art and can be used to ensure consistently high levels of expressed proteins. See, for example, Keasling, J., Trends in Biotechnology 17:452-460, 1999. Optimization of media and culture conditions may also enhance expression of the gene.

[0370] Methods for facilitating expression of genes in bacteria have been described. See, for example, Guerrero, C, et al., Gene 138(1-2):35-41, 1994; Eikmanns, B. J., et al. Gene 102(1):93-8, 1991; Schwarzer, A., and Puhler, A. Biotechnol. 9(1):84-7, 1991; Labarre, J., et al., J Bacteriol. 175(4):1001-7, 1993; Malumbres, M., et al. Gene 134(1):15-24, 1993; Jensen, P. R., and Hammer, K. Biotechnol Bioeng. 158(2-3):191-5, 1998; Makrides, S. C. Microbiol Rev. 60(3):512-38, 1996; Tsuchiya et al. Bio/Technology 6:428-431,1988; U.S. Pat. No. 5,965,931; U.S. Pat. No. 4,601,893; and U.S. Pat. No. 5,175,108.

[0371] A gene of interest (e.g., a heterologous or variant gene) should be operably linked to an appropriate promoter, such as a native or host strain-derived promoter, a phage promoter, one of the well-characterized E. coli promoters (e.g. tac, trp, phoA, araBAD, or variants thereof etc.). Other suitable promoters are also available. In one embodiment, the heterologous gene is operably linked to a promoter that permits expression of the heterologous gene at levels at least 2-fold, 5-fold, or 10-fold higher than levels of the endogenous homolog in the host strain. Plasmid vectors that aid the process of gene amplification by integration into the chromosome can be used. See, for example, by Reinscheid et al. (Appl. Environ Microbiol. 60: 126-132,1994). In this method, the complete gene is cloned in a plasmid vector that can replicate in a host (typically E. coli), but not in C. glutamicum. These vectors include, for example, pSUP301 (Simon et al., Bio/Technol. 1, 784-79,1983), pK18mob or pK19mob (Schfer et al., Gene 145:69-73, 1994), PGEM-T (Promega Corp., Madison, Wis., USA), pCR2.1 -TOPO (Shuman J Biol Chem. 269:32678-84, 1994; U.S. Pat. No. 5,487,993), pCR.RTM.Blunt (Invitrogen, Groningen, Holland; Bernard et al., J Mol Biol., 234:534-541,1993), pEMI (Schrumpf et al. J Bacteriol. 173:4510-4516, 1991) or pBGS8 (Spratt et al., Gene 41:337-342, 1996). The plasmid vector that contains the gene to be amplified is then transferred into the desired strain of C. glutamicum by conjugation or transformation. The method of conjugation is described, for example, by Schfer et al. (Appl Environ Microbiol. 60:756-759,1994). Methods for transformation are described, for example, by Thierbach et al. (Appl Microbiol Biotechnol. 29:356-362,1988), Dunican and Shivnan (Bio/Technol. 7:1067-1070,1989) and Tauch et al. (FEMS Microbiol Lett. 123:343-347,1994). After homologous recombination by means of a genetic cross over event, the resulting strain contains the desired gene integrated in the host genome.

[0372] An appropriate expression plasmid can also contain at least one selectable marker. A selectable marker can be a nucleotide sequence that confers antibiotic resistance in a host cell. These selectable markers include ampicillin, cefazolin, augmentin, cefoxitin, ceftazidime, ceftiofur, cephalothin, enrofloxicin, kanamycin, spectinomycin, streptomycin, tetracycline, ticarcillin, tilmicosin, or chloramphenicol resistance genes. Additional selectable markers include genes that can complement nutritional auxotrophies present in a particular host strain (e.g. leucine, alanine, or homoserine auxotrophies).

[0373] In one embodiment, a replicative vector is used for expression of the heterologous gene. An exemplary replicative vector can include the following: a) a selectable marker, e.g., an antibiotic marker, such as kanR (from pACYC184); b) an origin of replication in E. coli, such as the P15a ori (from pACYC 184); c) an origin of replication in C. glutamicum such as that found in pBL1; d) a promoter segment, with or without an accompanying repressor gene; and e) a terminator segment. The promoter segment can be a lac, trc, trcRBS, tac, or λP_{L}/λP_{R} (from E. coli), orphoA, gpd, rplM, rpsJ (from C. glutamicum). The repressor gene can be lacIor cI857, for lac, trc, trcRBS, tac and λP_{L}/λP_{R}, respectively. The terminator segment can be from E. coli rrnB (from ptrc99a), the T7 terminator (from pET26), or a terminator segment from C. glutamicum.

[0374] In another embodiment, an integrative vector is used for expression of the heterologous gene. An exemplary integrative vector can include: a selectable marker, e.g., an antibiotic marker, such as kanR (from pACYC l 84); b) an origin of replication in E. coli, such as the P15a ori (from pACYC184); c) and d) two segments of the C. glutamicum genome that flank the segment to be replaced, such as the pck or hom genes; e) the sacB gene from B. subtilis; f) a promoter segment to control expression of the heterologous gene, with or without an accompanying repressor gene; and g) a terminator segment. The promoter segment can be lac, trc, trcRBS, tac, or λP_{L}/λP_{R} (from E. coli), or phoa, gpd, rplM, rpsj (from C. glutamicum). The repressor genes can be lacI or cI, for lac, trc, trcRBS, tac and λP_{L}/λP_{R}, respectively. The terminator segment can be from E. coli rrnB (from ptrc99a), the T7 terminator (from pET26), or a terminator segment from C. glutamicum. The possible integrative or replicative plasmids, or reagents used to construct these plasmids, are not limited to those described herein. Other plasmids are familiar to those in the art.

[0375] For use of terminator segments from C. glutamicum, the terminator and flanking sequences can be supplied by a single gene segment. In this case, the above elements will be arranged in the following sequence on the plasmid: marker; origin of replication; a segment of the C. glutamicum genome that flanks the segment to be replaced; promoter; C. glutamicum terminator; sacB gene. The sacB gene can also be placed between the origin of replication and the C. glutamicum flanking segment. Integration and excision results in the insertion of only the promoter, terminator, and the gene of interest.

[0376] A multiple cloning site can be positioned in one of several possible locations between the plasmid elements described above in order to facilitate insertion of the particular genes of interest (e.g., lysC, etc.) into the plasmid. For both replicative and integrative vectors, the addition of an origin of conjugative transfer, such as RP4 mob, can facilitate gene transfer between E. coli and C. glutamicum.

[0377] In one embodiment, a bacterial gene is expressed in a host strain with an episomal plasmid. Suitable plasmids include those that replicate in the chosen host strain, such as a coryneform bacterium. Many known plasmid vectors, such as e.g. pZ1 (Menkel et al., Applied Environ Microbiol. 64:549-554, 1989), pEKEx1 (Eikmanns et al., Gene 102:93-98,1991) or pHS2-1 (Sonnen et al., Gene 107:69-74, 1991) are based on the cryptic plasmids pHM1519, pBL1 or pGA1. Other plasmid vectors that can be used include those based on pCG4 (U.S. Pat. No. 4,489,160), or pNG2 (Serwold-Davis et al., FEMS Microbiol Lett. 66:119-124,1990), or pAG1 (U.S. Pat. No. 5,158,891). Alternatively, the gene or genes may be integrated into chromosome of a host microorganism by a method using transduction, transposon (Berg, D. E. and Berg, C. M., Bio/Technol. 1:417,1983), Mu phage (Japanese Patent Application Laid-open No. 2-109985) or homologous or non-homologous recombination (Experiments in Molecular Genetics, Cold Spring Harbor Lab.,1972).

[0378] In addition, it may be advantageous for the production of amino acids to enhance one or more enzymes of the particular biosynthesis pathway, of glycolysis, of anaplerosis, or of amino acid export, using more than one gene or using a gene in combination with other biosynthetic pathway genes.

[0379] It also may be advantageous to simultaneously attenuate the expression of particular gene products to maximize production of a particular amino acid. For example, attenuation of metK expression or MetK activity can enhance methionine production by prevention conversion of methionine to S-AM.

[0380] Methods of introducing nucleic acids into host cells are known in the art. See, for example, Sambrook, J., and Russell, D. W. Molecular Cloning: A Laboratory Manual, 3^{nd} Ed., Cold Spring Harbor Laboratory Press, Cold Spring Harbor, N.Y., 2001. Suitable methods include transformation using calcium chloride (Mandel, M. and Higa, A. J. Mol Biol. 53:159, 1970) and electroporation (Rest, M. E. van der, et al. Appl Microbiol. Biotechnol. 52:541-545, 1999), or conjugation.

Cultivation of Bacteria

[0381] The bacteria containing gene(s) of interest (e.g., heterologous genes, variant genes encoding enzymes with reduced feedback inhibition) can be cultured continuously or by a batch fermentation process (batch culture). Other commercially used process variations known to those skilled in the art include fed batch (feed process) or repeated fed batch process (repetitive feed process). A summary of known culture methods is described in the textbook by Chmiel (Bioprozesstechnik 1. Einfuhrung in die Bioverfahrenstechnik (Gustav Fischer Verlag, Stuttgart, 1991)) or in the textbook by Storhas (Bioreaktoren und periphere Einrichtungen (Vieweg Verlag, Braunschweig/Wiesbaden, 1994)).

[0382] The culture medium to be used fulfills the requirements of the particular host strains. General descriptions of culture media suitable for various microorganisms can be found in the book “Manual of Methods for General Bacteriology” of the American Society for Bacteriology (Washington D.C., USA, 1981), although those skilled in the art will recognize that the composition of the culture medium is often modified beyond simple growth requirements in order to maximize product formation.

[0383] Sugars and carbohydrates, such as e.g., glucose, sucrose, lactose, fructose, maltose, starch and cellulose; oils and fats, such as e.g. soy oil, sunflower oil, groundnut oil and coconut fat; fatty acids, such as e.g. palmitic acid, stearic acid and linoleic acid; alcohols, such as e.g. glycerol and ethanol; and organic acids, such as e.g. acetic acid, can be used as the source of carbon, either individually or as a mixture.

[0384] Organic nitrogen-containing compounds, such as peptones, yeast extract, meat extract, malt extract, corn steep liquor, soy protein hydrolysate, soya bean flour and urea, or inorganic compounds, such as ammonium sulfate, ammonium chloride, ammonium phosphate, ammonium carbonate and ammonium nitrate, can be used as the source of nitrogen. The sources of nitrogen can be used individually or as a mixture.

[0385] Phosphoric acid, potassium dihydrogen phosphate, dipotassium hydrogen phosphate, or the corresponding sodium-containing salts can be used as the source of phosphorus.

[0386] Organic and inorganic sulfur-containing compounds, such as, for example, sulfates, thiosulfates, sulfites, reduced sources such as H₂S, sulfides, derivatives of sulfides, methyl mercaptan, thioglycolytes, thiocyanates, and thiourea, can be used as sulfur sources for the preparation of sulfur-containing amino acids.

[0387] The culture medium can also include salts of metals, e.g., magnesium sulfate or iron sulfate, which are necessary for growth. Essential growth substances, such as amino acids and vitamins (e.g. cobalamin), can be employed in addition to the above-mentioned substances. Suitable precursors can moreover be added to the culture medium. The starting substances mentioned can be added to the culture as a single batch, or can be fed in during the culture at multiple points in time.

[0388] Basic compounds, such as sodium hydroxide, potassium hydroxide, calcium carbonate, ammonia or aqueous ammonia, or acid compounds, such as phosphoric acid or sulfuric acid, can be employed in a suitable manner to control the pH. Antifoams, such as e.g. fatty acid polyglycol esters, can be employed to control the development of foam. Suitable substances having a selective action, such as e.g. antibiotics, can be added to the medium to maintain the stability of plasmids. To maintain aerobic conditions, oxygen or oxygen-containing gas mixtures, such as e.g. air, are introduced into the culture. The temperature of the culture is typically between 20-45° C. and preferably 25-40° C. Culturing is continued until a maximum of the desired product has formed, usually within 10 hours to 160 hours.

[0389] The fermentation broths obtained in this way, can contain a dry weight of 2.5 to 25 wt. % of the amino acid of interest. It also can be advantageous if the fermentation is conducted in such that the growth and metabolism of the production microorganism is limited by the rate of carbohydrate addtion for some portion of the fermentation cycle, preferably at least for 30% of the duration of the fermentation. For example, the concentration of utilizable sugar in the fermentation medium is maintained at <3 g/l during this period.

[0390] The fermentation broth can then be further processed. All or some of the biomass can be removed from the fermentation broth by any solid-liquid separation method, such as centrifugation, filtration, decanting or a combination thereof, or it can be left completely in the broth. Water is then removed from the broth by known methods, such as with the aid of a multiple-effect evaporator, thin film evaporator, falling film evaporator, or by reverse osmosis. The concentrated fermentation broth can then be worked up by methods of freeze drying, spray drying, fluidized bed drying, or by other processes to give a preferably free-flowing, finely divided powder.

[0391] The free-flowing, finely divided powder can then in turn by converted by suitable compacting or granulating processes into a coarse-grained, readily free-flowing, storable and largely dust-free product. In the granulation or compacting it can be advantageous to use conventional organic or inorganic auxiliary substances or carriers, such as starch, gelatin, cellulose derivatives or similar substances, such as are conventionally used as binders, gelling agents or thickeners in foodstuffs or feedstuffs processing, or further substances, such as, for example, silicas, silicates or stearates.

[0392] Alternatively, however, the product can be absorbed on to an organic or inorganic carrier substance which is known and conventional in feedstuffs processing, for example, silicas, silicates, grits, brans, meals, starches, sugars or others, and/or mixed and stabilized with conventional thickeners or binders.

[0393] Finally, the product can be brought into a state in which it is stable to digestion by animal stomachs, in particular the stomach of ruminants, by coating processes using film-forming agents, such as, for example, metal carbonates, silicas, silicates, alginates, stearates, starches, gums and cellulose ethers, as described in DE-C-4100920.

[0394] If the biomass is separated off during the process, further inorganic solids, for example, those added during the fermentation, are generally removed.

[0395] In one aspect of the invention, the biomass can be separated off to the extent of up to 70%, preferably up to 80%, preferably up to 90%, preferably up to 95%, and particularly preferably up to 100%. In another aspect of the invention, up to 20% of the biomass, preferably up to 15%, preferably up to 10%, preferably up to 5%, particularly preferably no biomass is separated off.

[0396] Organic substances which are formed or added and are present in the solution of the fermentation broth can be retained or separated by suitable processes. These organic substances include organic by-products that are optionally produced, in addition to the desired L-amino acid, and optionally discharged by the microorganisms employed in the fermentation. These include L-amino acids chosen from the group consisting of L-lysine, L-valine, L-threonine, L-alanine, L-methionine, L-isoleucine, or L-tryptophan. They include vitamins chosen from the group consisting of vitamin B1 (thiamine), vitamin B2 (riboflavin), vitamin B5 (pantothenic acid), vitamin B6 (pyridoxine), vitamin B12 (cyanocobalamin), nicotinic acid/nicotinanide and vitamin E (tocopherol). They also include organic acids that carry one to three carboxyl groups, such as, acetic acid, lactic acid, citric acid, malic acid or fumaric acid. Finally, they also include sugars, for example, trehalose. These compounds are optionally desired if they improve the nutritional value of the product.

[0397] These organic substances, including L- and/or D-amino acid and/or the racemic mixture D,L-amino acid, can also be added, depending on requirements, as a concentrate or pure substance in solid or liquid form during a suitable process step. These organic substances mentioned can be added individually or as mixtures to the resulting or concentrated fermentation broth, or also during the drying or granulation process. It is likewise possible to add an organic substance or a mixture of several organic substances to the fermentation broth and a further organic substance or a further mixture of several organic substances during a later process step, for example granulation. The product described above can be used as a feed additive, i.e. feed additive, for animal nutrition. For methods of preparing amino acids for use as feed additives, see, e.g., WO 02/18613, the contents of which are herein incorporated by reference.

### EXAMPLE 1

### Construction of Vectors for Expression of Genes for Enhancing Production of Aspartate-Derived Amino Acids

[0398] Plasmids were generated for expression of genes relevant to the production of aspartate-derived amino acids. Many of the target genes are shown in FIG. 1 and 2, which depicts most of the biosynthetic genes directly involved in producing aspartate-derived amino acids. These plasmids, which may either replicate autonomously or integrate into the host C. glutamicum chromosome, were introduced into strains of corynebacteria by electroporation as described (see Follettie, M. T., et al. J. Bacteriol. 167:695-702, 1993). All plasmids contain the kanR gene that confers resistance to the antibiotic kanamycin. Transformants were selected on media containing kanamycin (25 mg/L).

[0399] For expression from episomal plasmids, vectors were constructed using derivatives of the cryptic C. glutamicum low-copy pBL1 plasmid (see Santamaria et al. J. Gen. Microbiol. 130:2237-2246, 1984). Episomal plasmids contain sequences that encode a replicase, which enables replication of the plasmid within C. glutamicum; therefore, these plasmids can be propagated without integration into the chromosome. Plasmids MB3961 and MB4094 were the vector backbones used to construct episomal expression plasmids described herein (see FIGS. 3 and 4). Plasmid MB4094 contains an improved origin of replication, relative to MB3961, for use in corynebacteria; therefore, this backbone was used for most studies. Both MB3961 and MB4094 contain regulatory sequences from pTrc99A (see Amann et al., Gene 69:301-315, 1988). The 3′ portion of the lacIq-trc IPTG-inducible promoter cassette resides within the polylinker in such a way that genes of interest can be inserted as fragments containing NcoI-NotI compatible overhangs, with the NcoI site adjacent to the start site of the gene of interest (additional polylinker sites such as KpnI can also be used instead of the NotI site). In addition, useful promoters such as a modified trc promoter (trcRBS) and the C. glutamicum gpd, rplM, and rpsJ promoters can be inserted into the MB3961 and MB4094 backbones on convenient restriction fragments, including NheI-NcoI fragments. The trcRBS promoter contains a modified ribosomal-binding site that was shown to enhance levels of expressed proteins. The sequences of promoters employed in these studies for expression of genes are found in Table 7.

TABLE 7
Promoters used to control expression of genes in corynebacteria.

| | | SEQ ID |
|---|---|---|
| Promoter | Sequence | NO: |
| Laclq-trc | ctagctacgttgacaccatcgaatggtgcaaaacctttcgcggtatggcatgatagcgcccggaa | 297 |
| | gagagtcaattcagggtggtgaatgtgaaaccagtaacgttatacgatgtcgcagagtatgccggt | |
| | gtctcttatcagaccgtttcccgcgtggtgaaccaggccagccacgtttctgcgaaaacgcggga | |
| | aaaagtggaagcggcgatggcggagctgaattacattcccaaccgcgtggcacaacaactggc | |
| | gggcaaacagtcgttgctgattggcgttgccacctccagtctggccctgcacgcgccgtcgcaaa | |
| | ttgtcgcggcgattaaatctcgcgccgatcaactgggtgccagcgtggtggtgtcgatggtagaa | |
| | cgaagcggcgtcgaagcctgtaaagcggcggtgcacaatcttctcgcgcaacgcgtcagtggg | |
| | ctgatcattaactatccgctggatgaccaggatgccattgctgtggaagctgcctgcactaatgttc | |
| | cggcgttatttcttgatgtctctgaccagacacccatcaacagtattattttctcccatgaagacggta | |
| | cgcgactgggcgtggagcatctggtcgcattgggtcaccagcaaatcgcgctgttagcgggccc | |
| | attaagttctgtctcggcgcgtctgcgtctggctggctggcataaatatctcactcgcaatcaaattc | |
| | agccgatagcggaacgggaaggcgactggagtgccatgtccggttttcaacaaaccatgcaaat | |
| | gctgaatgagggcatcgttcccactgcgatgctggttgccaacgatcagatggcgctgggcgca | |
| | atgcgcgccattaccgagtccgggctgcgcgttggtgcggatatctcggtagtgggatacgacga | |
| | taccgaagacagctcatgttatatcccgccgttaaccaccatcaaacaggattttcgcctgctgggg | |
| | caaaccagcgtggaccgcttgctgcaactctctcagggccaggcggtgaagggcaatcagctgt | |
| | tgcccgtctcactggtgaaaagaaaaaccaccctggcgcccaatacgcaaaccgcctctccccg | |
| | cgcgttggccgattcattaatgcagctggcacgacaggtttcccgactggaaagcgggcagtga | |
| | gcgcaacgcaattaatgtgagttagcgcgaattgatctggtttgacagcttatcatcgactgcacgg | |
| | tgcaccaatgcttctggcgtcaggcagccatcggaagctgtggtatggctgtgcaggtcgtaaatc | |
| | actgcataattcgtgtcgctcaaggcgcactcccgttctggataatgttttttgcgccgacatcataa | |
| | cggttctggcaaatattctgaaatgagctgttgacaattaatcatccggctcgtataatgtgtggaatt | |
| | gtgagcggataacaatttcacacaggaaacagac | |
| Laclq- | ctagctacgttgacaccatcgaatggtgcaaaacctttcgcggtatggcatgatagcgcccggaa | 298 |
| trcRBS | gagagtcaattcagggtggtgaatgtgaaaccagtaacgttatacgatgtcgcagagtatgccggt | |
| | gtctcttatcagaccgtttcccgcgtggtgaaccaggccagccacgtttctgcgaaaacgcggga | |
| | aaaagtggaagcggcgatggcggagctgaattacattcccaaccgcgtggcacaacaactggc | |
| | gggcaaacagtcgttgctgattggcgttgccacctccagtctggccctgcacgcgccgtcgcaaa | |
| | ttgtcgcggcgattaaatctcgcgccgatcaactgggtgccagcgtggtggtgtcgatggtagaa | |
| | cgaagcggcgtcgaagcctgtaaagcggcggtgcacaatcttctcgcgcaacgcgtcagtggg | |
| | ctgatcattaactatccgctggatgaccaggatgccattgctgtggaagctgcctgcactaatgttc | |
| | cggcgttatttcttgatgtctctgaccagacacccatcaacagtattattttctcccatgaagacggta | |
| | cgcgactgggcgtggagcatctggtcgcattgggtcaccagcaaatcgcgctgttagcgggccc | |
| | attaagttctgtctcggcgcgtctgcgtctggctggctggcataaatatctcactcgcaatcaaattc | |
| | agccgatagcggaacgggaaggcgactggagtgccatgtccggttttcaacaaaccatgcaaat | |
| | gctgaatgagggcatcgttcccactgcgatgctggttgccaacgatcagatggcgctgggcgca | |
| | atgcgcgccattaccgagtccgggctgcgcgttggtgcggatatctcggtagtgggatacgacga | |
| | taccgaagacagctcatgttatatcccgccgttaaccaccatcaaacaggattttcgcctgctgggg | |
| | caaaccagcgtggaccgcttgctgcaactctctcagggccaggcggtgaagggcaatcagctgt | |
| | tgcccgtctcactggtgaaaagaaaaaccaccctggcgcccaatacgcaaaccgcctctccccg | |
| | cgcgttggccgattcattaatgcagctggcacgacaggtttcccgactggaaagcgggcagtga | |
| | gcgcaacgcaattaatgtgagttagcgcgaattgatctggtttgacagcttatcatcgactgcacgg | |
| | tgcaccaatgcttctggcgtcaggcagccatcggaagctgtggtatggctgtgcaggtcgtaaatc | |
| | actgcataattcgtgtcgctcaaggcgcactcccgttctggataatgttttttgcgccgacatcataa | |
| | cggttctggcaaatattctgaaatgagctgttgacaattaatcatccggctcgtataatgtgtggaatt | |
| | gtgagcggataacaatttcacacaggaaacagagaattcaaaggaggacaac | |
| C. | Ctagcctaaaaacgaccgagcctattgggattaccattgaagccagtgtgagttgcatcacattgg | 299 |
| glutamicum | cttcaaatctgagactttaatttgtggattcacgggggtgtaatgtagttcataattaaccccattcgg | |
| gpd | gggagcagatcgtagtgcgaacgatttcaggttcgttccctgcaaaaactatttagcgcaagtgttg | |
| | gaaatgcccccgtttggggtcaatgtccatttttgaatgtgtctgtatgattttgcatctgctgcgaaat | |
| | ctttgtttccccgctaaagttgaggacaggttgacacggagttgactcgacgaattatccaatgtga | |
| | gtaggtttggtgcgtgagttggaaaaattcgccatactcgcccttgggttctgtcagctcaagaattc | |
| | ttgagtgaccgatgctctgattgacctaactgcttgacacattgcatttcctacaatctttagaggaga | |
| | cacaac | |
| C. | ctagcggggttgctgcactttttaaaaaggcaaaaaatagcgaaaacacaccccaggtttttcccgt | 300 |
| glutamicum | aaccccgctaggctatgcaatttcggtttaacccagtttttcaaagaaggtcactagcttttccgctg | |
| rplM | gtcaccttctttttggtttttcaacgcagagatagtacactttactctttgtgtgtggagtcaaacctccc | |
| | ctttaaggggtgcgcttggacagcaggacaaattcgggtcaccaccggccgccgaatttagcttc | |
| | cttccgaacatattcctggctggcagttctagaccgactaattcaaggagtcattc | |
| C. | ctagctatttcagtgcggggcagtgaaagtaaaaacgcaactttcttacagaacagggttgtctttc | 301 |
| glutamicum | agacgactatgtggttaactacttgggctgctttaacacggcgtgaattaaccatgccagttggtaa | |
| rpsJ | ggcaaacatgacaccttcaattggagtcgaggcgcatgaaaatgcacttcaacttcagggggtat | |
| | ccactgaagccgggtgactggtgaaggcggaaccggagaaggggcatggcaaataaacagcg | |
| | gcagttacgttagggcctagatcacgcattttggtcccttccgatttccctgacttcattgttgggttca | |
| | tcgtggagcgttttatttgtacagcgcccgtgatccaatgtcagaagcatttgacaggtcaggttaaa | |
| | cactggcgttgcgcccgagccccaagcccggacaacgttatagagaaagaatgaagcgaattcc | |
| | caccgcttttccaaaatggaagatgtgggacgagcgaggaagaggataagc | |

[0400] Plasmids were also designed to inactivate native C. glutamicum genes by gene deletion. In some instances, these constructs both delete native genes and insert heterologous genes into the host chromosome at the locus of the deletion event. Table 8 lists the endogenous gene that was deleted and the heterologous genes that were introduced, if any. Deletion plasmids contain nucleotide sequences homologous to regions upstream and downstream of the gene that is the target for the deletion event; in some instances these sequences include small amounts of coding sequence of the gene that is to be inactivated. These flanking sequences are used to facilitate homologous recombination. Single cross-over events target the plasmid into the host chromosome at sites upstream or downstream of the gene to be deleted. Deletion plasmids also contain the sacB gene, encoding the levansucrase gene from Bacillus subtilis. Transformants containing integrated plasmids were streaked to BHI medium lacking kanamycin. After 1 day, colonies were streaked onto BHI medium containing 10% sucrose. This protocol selects for strains in which the sacB gene has been excised, since it polymerizes sucrose to form levan that is toxic to C. glutamicum (see Jager, W., et al. J. Bacteriol. 174:5462-5465, 1992). During growth of transformants upon medium containing sucrose, sacB allows for positive selection for recombination events, resulting in either a clean deletion event or removal of all portions of the integrating plasmid except for the cassette that regulates the inducible expression of a particular gene of interest (see Jager, W., et al. J. Bacteriol. 174:5462-5465, 1992). PCR, together with growth on diagnostic media, was used to verify that expected recombination events have occurred in sucrose-resistant colonies. FIGS. 5-12A display deletion plasmids described herein.

TABLE 8
Plasmids used for deletion of C. glutamicum genes, sometimes
in conjunction with insertion of expression cassettes.

| | Native gene(s) | |
|---|---|---|
| Plasmid | deleted | Element inserted at locus |
| MB4083 | hom-thrB | None |
| MB4084 | thrB | None |
| MB4165 | mcbR | None |
| MB4169 | hom-thrB | gpd-M. smegmatis |
| | | lysC(T311I)-asd |
| MB4192 | hom-thrB | gpd-S. coelicolor |
| | | hom(G362E) |
| MB4276 | pck | gpd-M. smegmatis |
| | | lysC(T311I)-asd |
| MB4286 | mcbR | trcRBS-T. fusca metA |
| MB4287 | mcbR | trcRBS-C. glutamicum metA |
| | | (K233A)-metB |

### EXAMPLE 2

### Isolation of Genes for Enhancing Production of Aspartate-Derived Amino Acids

[0401] Wild-type alleles of aspartokinase alpha (lysC-alpha) and beta (lysC-beta) and aspartate semialdehyde dehydrogenase (asd) from Mycobacterium smegmatis (homologs of lysC/asd in Corynebacterium glutamicum); genes encoding aspartokinase-asd (lysC-asd), dapA, and hom from Streptomyces coelicolor; metA and metYA from Thermobifida fusca; and dapA and ppc from Erwinia chrysanthemi are obtained by PCR amplification using genomic DNA isolated from each organism. In addition, in some cases the corresponding wild-type allele for each gene is isolated from C. glutamicum. Amplicons are subsequently cloned into pBluescriptSK II⁻ for sequence verification; in particular instances, site-directed mutagenesis to create the activated alleles is also performed in these vectors. Genomic DNA is isolated from M. smegmatis grown in BHI medium for 72 h at 37° C. using QIAGEN Genomic-tips according to the recommendations of the manufacturer kits (Qiagen, Valencia, Calif.). For the isolation of genomic DNA from S. coelicolor, the Salting Out Procedure (as described in Practical Streptomyces Genetics, pp. 169-170, Kieser, T., et. al., John Innes Foundation, Norwich, England 2000) is used on cells grown in TYE media (ATCC medium 1877 ISP Medium 1) for 7 days at 25° C.

[0402] To isolate genomic DNA from T. fusca, cells are grown in TYG media (ATCC medium 741) for 5 days at 50° C. The 100 ml culture is spun down (5000 rpm for 10 min at 4° C.) a washed twice with 40 ml 10 mM Tris, 20 mM EDTA pH 8.0. The cell pellet is brought up in a final volume of 40 ml of 10 mMTris, 20 mM EDTA pH 8.0. This suspension is passed through a Microfluidizer (Microfluidics Corporation, Newton Mass.) for 10 cycles and collected. The apparatus is rinsed with an additional 20 ml of buffer and collected. The final volume of lysed cells is 60 ml. DNA is precipitated from the suspension of lysed cells by isopropanol precipitation, and the pellet is resuspended in 2 ml TE pH 8.0. The sample is extracted with phenol/chloroforn and the DNA precipitated once again with isopropanol. To isolate DNA from E. chrysanthemi, genomic DNA was prepared as described for E. coli (Qiagen genomic protocol) using a Genomic Tip 500/G.

[0403] For PCR amplification of the M. smegmatis IysC-asd operon, primers are designed according to sequence upstream of the lysC gene and sequence near the stop of asd. The upstream primer is 5′-CCGTGAGCTGCTCGGATGTGACG-3′ (SEQ ID NO:302), the downstream primer is 5′-TCAGAGGTCGGCGGCCAACAGTTCTGC-3′ (SEQ ID NO:303). The genes are amplified using Pfu Turbo (Stratagene, La Jolla, Calif.) in a reaction mixture containing 10 μl 10× Cloned Pfu buffer, 8 μl dNTP mix (2.5 mM each), 2 μl each primer (20 uM), 1 μl Pfu Turbo, 10 ng genomic DNA and water in a final reaction volume of 100 μl. The reaction conditions are 94° C. for 2 min, followed by 28 cycles of 94° C. for 30 sec, 60° C. for 30sec, 72° C. for 9 min. The reaction is completed with a final extension at 72° C. for 4 min, and the reaction is then cooled to 4° C. The resulting product is purified by the Qiagen gel extraction protocol followed by blunt end ligation into the SmaI site of pBluescript SK II−. Ligations are transformed into E. coli DH5α and selected by blue/white screening. Positive transformants are treated to isolate plasmid DNA by Qiagen methods and sequenced. MB3902 is the resulting plasmid containing the expected insert.

[0404] Primer pairs for amplifying S. coelicolor genes are: 5′-ACCGCACTTTCCCGAGTGAC-3′ (SEQ ID NO:304) and 5′-TCATCGTCCGCTCTTCCCCT-3′ (lysC-asd) (SEQ ID NO:305); 5′-ATGGCTCCGACCTCCACTCC-3′ (SEQ ID NO:306) and 5′-CGTGCAGAAGCAGTTGTCGT-3′ (dapA) (SEQ ID NO:307); and 5′-TGAGGTCCGAGGGAGGGAAA-3′ (SEQ ID NO:308) and 5′-TTACTCTCCTTCAACCCGCA-3′ (hom) (SEQ ID NO:309). The primer pair for amplifying the metYA operon from T. fusca is 5′- CATCGACTACGCCCGTGTGA-3′ (SEQ ID NO:310) and 5′-TGGCTGTTCTTCACCGCACC-3′ (SEQ ID NO:311). Primer pairs for amplifying E. chrysanthemi genes are: 5′- TTGACCTGACGCTTATAGCG-3′ (SEQ ID NO:312) and 5′-CCTGTACAAAATGTTGGGAG-3′ (dapA) (SEQ ID NO:313); and 5′-ATGAATGAACAATATTCCGCCA-3′ (SEQ ID NO:314) and 5′-TTAGCCGGTATTGCGCATCC-3′ (ppc) (SEQ ID NO:315).

[0405] Amplification of genes was done by similar methods as above or by using the TripleMaster PCR System from Eppendorf (Eppendorf, Hamburg, Germany). Blunt end ligations were performed to clone amplicons into the SmaI site of pBluescript SK II−. The resulting plasmids were MB3947 (S. coelicolor lysC-asd), MB3950 (S. coelicolor dapA), MB4066 (S. coelicolor hom), MB4062 (T. fusca metYA), MB3995 (E. chrysanthemi dapA), and MB4077 (E. chrysanthemippc). These plasmids were used for sequence verification of inserts and subsequent cloning into expression vectors; a subset of these vectors was also subjected to site-directed mutagenesis to generate deregulated alleles of specific genes.

### EXAMPLE 3

### Targeted Substitutions to Enhance the Activity of Genes Involved in the Production of Aspartate-Derived Amino Acids

[0406] Site-directed mutagenesis was performed on several of the pBluescript SK II− plasmids containing the heterologous genes described in Example 2. Site-directed mutagenesis was performed using the QuikChange Site-Directed Mutagenesis Kit from Stratagene. For heterologous aspartokinase (lysC/ask) genes, substitution mutations were constructed that correspond to the T311I, S301Y, A279P, and G345D amino acid substitutions in the C. glutamicum protein. These substitutions may decrease feedback inhibition by the combination of lysine and threonine. In all instances, the mutated lysC/ask alleles were expressed in an operon with the heterologous asd gene. Oligonucleotides employed to construct M. smegmatis feedback resistant lysC alleles were: 5′-GGCAAGACCGACATCATATTCACGTGTGCGCGTG-3′ (SEQ ID NO:316) and 5′-CACGCGCACACGTGAATATGATGTCGGTCTTGCC-3′ (T3 11I) (SEQ ID NO:317); 5′-GGTGCTGCAGAACATCTACAAGATCGAGGACGGCAA-3′ (SEQ ID NO:318) and 5′-TTGCCGTCCTCGATCTTGTAGATGTTCTGCAGCACC-3′ (S301Y) (SEQ ID NO:319); 5′-GACGTTCCCGGCTACGCCGCCAAGGTGTTCCGC-3′ (SEQ ID NO:320) and 5′-GCGGAACACCTTGGCGGCGTAGCCGGGAACGTC-3′ (A279P) (SEQ ID NO:321); and 5′-GTACGACGACCACATCGACAAGGTGTCGCTGATCG-3′ (SEQ ID NO:322); and 5′-CGATCAGCGACACCTTGTCGATGTGGTCGTCGTAC-3′ (G345D) (SEQ ID NO:323). Oligonucleotides employed to construct S. coelicolor feedback resistant lysC alleles were: 5′-CGGGCCTGACGGACATCRTCTTCACGCTCCCCAAG-3′ (SEQ ID NO:324) and 5′-CTTGGGGAGCGTGAAGAYGATGTCCGTCAGGCCCG-3′ (S3141/S314V) (SEQ ID NO:325); and 5′-GTCGTGCAGAACGTGTACGCCGCCTCCACGGGC-3′ (SEQ ID NO:326) and 5′-GCCCGTGGAGGCGGCGTACACGTTCTGCACGAC-3′ (S304Y) (SEQ ID NO:327).

[0407] Site-directed mutagenesis can be performed to generate deregulated alleles of additional proteins relevant to the production of aspartate-derived amino acids. For example, mutations can be generated that correspond to the V59A, G378E, or carboxy-terminal truncations of the C. glutamicum hom gene. The Transformer Site-Directed Mutagenesis Kit (BD Biosciences Clontech) was used to generate the S. coelicolor hom (G362E) substitution. Oligonucleotides 5′-GTCGACGCGTCTTAAGGCATGCAAGC-3′ (SEQ ID NO:328) and 5′-CGACAAACCGGAAGTGCTCGCCC-3′ (SEQ ID NO:329) were utilized to construct the mutation. Site-directed mutagenesis was also employed to generate specific alleles of the T. fusca and C. glutamicum metA and metY genes (see examples 5 and 6 of the instant specification). Similar strategies can be used to construct deregulated alleles of additional pathway proteins. For example, oligonucleotides 5′-TTCATCGAACAGCGCTCGCACCTGCTGACCGCC-3′ (SEQ ID NO:330) and 5′-GGCGGTCAGCAGGTGCGAGCGCTGTTCGATGAA-3′ (SEQ ID NO:331)can be used to generate a substitution in the S. coelicolor pyc gene that corresponds to the C. glutamicum pyc P458S mutation. Site-directed mutagenesis can also be utilized to introduce substitutions that correspond to deregulated dapA alleles described above.

[0408] Wild-type and deregulated alleles of heterologous (and C. glutamicum) genes were then cloned into vectors suitable for expression. In general, PCR was employed using oligonucleotides to facilitate cloning of genes as a NcoI-NotI fragment. DNA sequence analysis was performed to verify that mutations were not introduced during rounds of amplification. In some instances, synthetic operons were constructed in order to express two or more genes, heterologous or endogenous, from the same promoter. As an example, plasmid MB4278 was generated to express the C. glutamicum metA, metY, and metH genes from the trcRBS promoter. FIG. 12B displays the DNA sequence in MB4278 that spans from the trcRBS promoter to the stop of the metH gene; the gene order in this construct is metA YH. The open reading frames in FIG. 12B are shown in uppercase. Note that the construct was engineered such that each open reading frame is preceded by an identical stretch of DNA. This conserved sequence serves as a ribosomal-binding sequence that promotes efficient translation of C. glutamicum proteins. Similar intergenic sequences were used to construct additional synthetic operons.

### EXAMPLE 4

### Isolation of Additional Threonine-Insensitive Mutants of Homoserine Dehydrogenase

[0409] The hom gene cloned from S. coelicolor in Example 2 is subjected to error prone PCR using the GeneMorph® Random Mutagenesis kit obtained from Stratagene. Under the conditions specified in this kit, oligonucleotide primers 5′-CACACGAAGACACCATGATGCGTACGCGTCCGCT-3′ (contains a BbsI site and cleavage yields a NcoI compatible overhang) (SEQ ID NO:332) and 5′-ATAAGAATGCGGCCGCTTACTCTCCTTCAACCCGCA-3′ (contains a NotI site) (SEQ ID NO:333) are used to amplify the hom gene from plasmid MB4066. The resulting mutant population is digested with BbsI and NotI, ligated into NcoI/NotI digested episomal plasmid containing the trcRBS promoter in the MB4094 plasmid backbone, and transformed into C. glutamicum ATCC 13032. The transformed cells are plated on agar plates containing a defined medium for corynebacteria (see Guillouet, S., et al. Appl. Environ. Microbiol. 65:3100-3107, 1999) containing kanamycin (25 mg/L), 20 mg/L of AHV (alpha-amino, beta-hydroxyvaleric acid; a threonine analog) and 0.01 mM IPTG. After 72 h at 30° C., the resulting transformants are subsequently screened for homoserine excretion by replica plating to a defined medium agar plate supplemented with threonine, which was previously spread with ˜10⁶ cells of indicator C. glutamicum strain MA-331 (hom-thrBA). Putative feedback-resistant mutants are identified by a halo of growth of the indicator strain surrounding the replica-plated transformants. From each of these colonies, the hom gene is PCR amplified using the above primer pair, the amplicon is digested as above, and ligated into the episomal plasmid described above. Each of these putative hom mutants is subsequently re-transformed into C. glutamicum ATCC 13032 and plated on minimal medium agar plates containing 25 mg/L kanamycin and 0.01 mM IPTG. One colony from each transformation is replica plated to defined medium for corynebacteria containing 10, 20, 50, and 100 mg/L of AHV, and sorted based on the highest level of resistance to the threonine analog. Representatives from each group are grown in minimal medium to an OD of 2.0, the cells harvested by centrifugation, and homoserine dehydrogenase activity assayed in the presence and absence of 20 mM threonine as referenced in Chassagnole, C., et al., Biochem. J. 356:415-423, 2001. The hom gene is PCR amplified from those cultures showing feedback-resistance and sequenced. The resulting plasmids are used to generate expression plasmids to enhance amino acid production.

### EXAMPLE 5

### Isolation of Feedback-Resistant Mutants of Homoserine O-Acetyltransferase (metA) and O-Acetylhomoserine Sulfhydrylase (metY)

[0410] The heterologous metA gene cloned from T. fusca is subjected to error prone PCR using the GeneMorph® Random Mutagenesis kit obtained from Stratagene. Under the conditions specified in this kit, oligonucleotide primers 5′-CACACACCTGCCACACATGAGTCACGACACCACCCCTCC-3′ (contains a BspMI site and cleavage yields a NcoI compatible overhang) (SEQ ID NO:334) and 5′-ATAAGAATGCGGCCGCTTACTGCGCCAGCAGTTCTT-3′ (contains a NotI site) (SEQ ID NO:335) are used to amplify the metA gene from plasmid MB4062. The resulting mutant amplicon is digested and ligated into the NcoIlNotI digested episomal plasmid described in Example 4, and then transformed into C. glutamicum strain MA-428. MA-428 is a derivative of ATCC 13032 that has been transformed with integrating plasmid MB4192. After selection for recombination events, the resulting strain MA-428 is deleted for hom-thrB in a manner that results in insertion of a deregulated S. coelicolor hom gene. The transformed MA-428 cells described are plated on minimal medium agar plates containing kanamycin (25 mg/L), 0.01 mM IPTG, and 100 μg/ml or 500 μg/ml of trifluoromethionine (TFM; a methionine analog). After 72 h at 30° C., the resulting transformants are subsequently screened for O-acetylhomoserine excretion by replica plating to a minimal agar plate which was previously spread with ˜10⁶ cells of an indicator strain, S. cerevisiae B-7588 (MATa ura3-5Z ura3-58, leu2-3, leu2-112, trp1-289, met2, HIS3+), obtained from ATCC (#204524). Putative feedback-resistant mutants are identified by the excretion of O-acetylhomoserine (OAH), which supports a halo of indicator strain growth surrounding the replica-plated transformants.

[0411] From each of these cross-feeding colonies, the metA gene is PCR amplified using the above primer pair, digested with BspMI and NotI, and ligated into the NotI/NcoI digested episomal plasmid described in example 4. Each of these putative metA mutant alleles is subsequently re-transformed into C. glutamicum ATCC 13032 and plated on minimal medium agar plates containing 25 mg/L kanamycin. One colony from each transformation is replica plated to minimal medium containing 100, 200, 500, and 1000 μg/ml of TFM plus 0.01 mM IPTG, and sorted based on the highest level of resistance to the methionine analog. Representatives from each group are grown in minimal medium to an OD of 2.0, the cells harvested by centrifugation, and homoserine O-acetyltransferase activity is determined by the methods described by Kredich and Tomkins (J. Biol. Chem. 241:4955-4965,1966) in the presence and absence of 20 mM methionine or S-AM. The metA gene is PCR amplified from those cultures showing feedback-resistance and sequenced. The resulting plasmids are used to generate expression plasmids to enhance amino acid production. In a similar manner, the metY gene from T. fusca is subjected to mutagenic PCR. Oligonucleotide primers 5′-CACAGGTCTCCCATGGCACTGCGTCCTGACAGGAG-3′ (contains a BsaI site and cleavage yields a NcoI compatible overhang) (SEQ ID NO:336) and 5′-ATAAGAATGCGGCCGCTCACTGGTATGCCTTGGCTG-3′ (contains a NotI site) (SEQ ID NO:337) are used for cloning into the episomal plasmid, as described above, and for carrying out the mutagenesis reaction per the specifications of the GeneMorph® Random Mutagenesis kit obtained from Stratagene. The major difference is that the mutated metYpopulation is transformed into a C. glutamicum strain that already produces high levels of O-acetylhomoserine. This strain, MICmet2, is constructed by transforming MA-428 with a modified version of plasmid MB4286 that contains a deregulated T. fusca metA allele described above under the control of the trcRBS promoter. After transformation the sacB selection system enables the deletion of the endogenous mcbR locus and replacement with the deregulated heterologous metA allele.

[0412] The T. fusca metY variant transformed MICmet2 strain is spread onto minimal agar plates containing 25 mg/L of kanamycin, 0.25mM IPTG, and an inhibiting concentration of toxic methionine analog(s) (e.g., ethionine, selenomethionine, TFM); the transfornants can be grown on these 3 different methionine analogs either individually or in double or triple combination). The metY gene is amplified from those colonies growing on the selection plates, the amplicons are digested and ligated into the episomal plasmid described in example 4, and the resulting plasmids are transformed into MICmet2. The transformants are grown on minimal medium agar plates containing 25 mg/L of kanamycin. The resulting colonies are replica-plated to agar plates containing a 10-fold range of the toxic methionine analogs ethionine, TFM, and selenomethionine (plus 0.01 mM IPTG), and sorted on the basis of analog sensitivity. Representatives from each group are grown in minimal medium to an OD of 2.0, the cells are harvested by centrifugation, and O-acetylhomoserine sulfhydrylase enzyme activity is determined by a modified version of the methods of Kredich and Tomkins (J. Biol. Chem. 241:4955-4965,1966) (see example 9) in the presence and absence of 20 mM methionine. The metY gene is PCR amplified from those cultures showing feedback-resistance and sequenced. The resulting plasmids are used to generate expression plasmids to enhance amino acid production. An expression plasmid containing the feedback resistant metY and metA variants from T. fusca is constructed as follows. The T. fusca metYA operon is amplified using oligonucleotides 5′-CACACACATGTCACTGCGTCCTGACAGGAGC-3′ (contains a Pcil site and cleavage yields a NcoI compatible overhang (also changes second codon from Ala>Ser)) (SEQ ID NO:338) and 5′-ATAAGAATGCGGCCGCTTACTGCGCCAGCAGTTCTT -3′ (contains a NotI site) (SEQ ID NO:339). The amplicon is digested with PciI and NotI, and the fragment is ligated into the above episomal plasmid that has been treated sequentially treated with NotI, HaeIII methylase, and NcoI. Site directed mutagenesis, performed using the QuikChange Site-Directed Mutagenesis Kit from Stratagene, is used to incorporate the described substitution mutations in T. fusca metA and metY into a single plasmid that expresses the deregulated alleles as an operon. The resulting plasmid is used to enhance amino acid production.

[0413] Minimal medium: 10 g glucose, 1 g NH₄H₂PO₄, 0.2 g KCl, 0.2 g MgSO₄-7H₂O, 30 and 1 ml TE per liter of deionized water (pH 7.2). Trace elements solution (TE) comprises: 88 mg Na₂B₄O₇-10H₂O, 37 mg (NH₄)₆Mo₇O₂₇-4H₂O, 8.8 mg ZnSO₄-7H₂O, 270 mg CuSO₄-5H₂O, 7.2 mg MnCl₂-4H₂O, and 970 mg FeCl₃-6H₂O per liter of deionized water. (When needed to support auxotrophic requirements, amino acids and purines are supplemented to 30 mg/L final concentration.)

### EXAMPLE 6

### Identification of S-AM-Binding Residues in Bacterial Amino Acid Sequences

[0414] Many enzymes that regulate amino acid production are subject to allosteric feedback inhibition by S-AM. We hypothesized that variants of these enzymes with resistance to S-AM regulation (e.g., via resistance to S-AM binding or to S-AM-induced allosteric effects) would be resistant to feedback inhibition. S-AM binding motifs have been identified in bacterial DNA methyltransferases (Roth et al., J. Biol. Chem., 273:17333-17342, 1998). Roth et al. identified a highly conserved amino acid motif in EcoRV α-adenine-N⁶-DNA methyltransferase which appeared to be critical for S-AM binding by the enzyme. We searched for related motifs in the amino acid sequences of the following proteins of C. glutamicum: MetA, MetY, McbR, LysC, MetB, MetC, MetE, MetH, and MetK. Putative S-AM binding motifs were identified in MetA, MetY, McbR, LysC, MetB, MetC, MetH, and MetK. We also identified additional residues in metY that are analogous to a S-AM binding motif in a yeast protein. (Pintard et al., Mol. Cell Biol., 20(4):1370-1381, 2000).

[0415] Residues of each protein that may be involved in S-AM binding are listed in Table 9.

TABLE 9
Putative residues involved in S-AM
binding in C. glutamicum proteins

| | Putative residue involved |
|---|---|
| Protein | in S-AM binding |
| MetA | G231 |
| | K233 |
| | F251 |
| | V253 |
| | D269 |
| MetY | G227 |
| | L229 |
| | D231 |
| | G232 |
| | G233 |
| | F235 |
| | D236 |
| | V239 |
| | F368 |
| | D370 |
| | D383 |
| | G346 |
| | K348 |
| McbR | G92 |
| | K94 |
| | F116 |
| | G118 |
| | D134 |
| LysC | G208 |
| | K210 |
| | F223 |
| | V225 |
| | D236 |
| MetB | G72 |
| | K74 |
| | F90 |
| | I92 |
| | D105 |
| MetC | G296 |
| | K298 |
| | F312 |
| | G314 |
| | D335 |
| MetH | G708 |
| | K710 |
| | F725 |
| | L727 |
| MetK | G263 |
| | K265 |
| | F282 |
| | G284 |
| | D291 |

[0416] Alignment of MetA and MetY sequences from other species was used to identify additional putative S-AM-binding residues. These residues are listed in Table 10.

TABLE 10
Putative S-AM binding amino acids in
bacterial MetA and MetY proteins

| | | Putative residue | |
|---|---|---|---|
| | | involved in S-AM | Homologous Residue |
| Protein | Organism | binding | in C. glutamicum |
| MetY | T. fusca | G240 | G227 |
| | | D244 | D231 |
| | | F379 | F368 |
| | | D394 | D383 |
| MetY | M. tuberculosis | G231 | G227 |
| | | D235 | D231 |
| | | F367 | F368 |
| | | D382 | D383 |
| MetA | T. fusca | G81 | analogous residue |
| | | | absent in |
| | | | C. glutamicum |
| | | D287 | D269 |
| | | F269 | F251 |
| MetA | E. coli | E252 | D269 |
| MetA | M. leprae | G73 | analogous residue |
| | | | absent in |
| | | | C. glutamicum |
| | | D278 | D269 |
| | | Y260 | D269 |
| MetA | M. tuberculosis | G73 | analogous residue |
| | | | absent in |
| | | | C. glutamicum |
| | | Y260 | F251 |
| | | D278 | D269 |

[0417] MetA and MetY genes were cloned from C. glutamicum and T. fusca as described in Example 2. Table 11 lists the plasmids and strains used for the expression of wild-type and mutated alleles of MetA and MetY genes. Tables 12 and 13 list the plasmids used for expression and the oligonucleotides employed for site-directed mutagenesis to generate MetA and MetY variants.

### EXAMPLE 7

### Preparation of Protein Extracts for MetA and MetY Assays

[0418] A single C. glutamicum colony was inoculated into seed culture media (see example 10 below) and grown for 24 hour with agitation at 33 ° C. The seed culture was diluted 1:20 in production soy media (40 mL) (example 10) and grown 8 hours. Following harvest by centrifugation, the pellet was washed lx in 1 volume of water. The pellet was resuspended in 250 μl lysis buffer (1 ml HEPES buffer, pH 7.5, 0.5 ml 1M KOH, 10 μl 0.5M EDTA, water to 5ml), 30 μl protease inhibitor cocktail, and 1 volume of 0.1 mm acid washed glass beads. The mixture was alternately vortexed and held on ice for 15 seconds each for 8 reptitions. After centrifugation for 5′ at 4,000 rpm, the supernatant was removed and re-spun for 20′ at 10,000 rpm. The Bradford assay was used to determine protein concentration in the cleared supernatant.

### EXAMPLE 8

### Quantifying MetA Activity in C. glutamicum Strains Containing Episomal Plasmids

[0419] MetA activity in C. glutamicum expressing endogenous and episomal metA genes was determined. MetA activity was assayed in crude protein extracts using a protocol described by Kredich and Tomkins (J. Biol. Chem.241(21):4955-4965, 1966). Preparation of protein extracts is described in the Example 7. Briefly, 1 μg of protein extract was added to a microtiter plate. Reaction mix (250 μl; 100 mM tris-HCl pH 7.5, 2mM 5,5′-Dithiobis(2-nitrobenzoic acid) (DTN), 2 mM sodium EDTA, 2 mM acetyl CoA, 2 mM homoserine) was added to each well of the microtiter plate. In the course of the reactions, MetA activity liberates CoA from acetyl-CoA. A disulfide interchange occurs between the CoA and DTN to produce thionitrobenzoic acid. The production of thionitrobenzoic acid is followed spectrophotometrically. Absorbance at 412 nm was measured every 5 minutes over a period of 30 minutes. A well without protein extract was included as a control. Inhibition of MetA activity was determined by addition of S-adenosyl methionine (S-AM; 0.02 mM, 0.2 mM, 2 mM) and methionine (.5 mM, 5 mM, 50 mM). Inhibitors were added directly to the reaction mix before it was added to the protein extract. In vitro O-acetyltransferase activity was measured in crude protein extracts derived from C. glutamicum strains MA-442 and MA-449 which contain both endogenous and episomal C. glutamicum MetA and MetY genes. Episomal metA and metY genes were expressed as a synthetic operon; the nucleic acid sequence of the metAY operon is as shown in the metAYH operon of FIG. 12B, only lacking metH sequence. The trcRBS promoter was employed in these episomal plasmids. MA-442 expresses the episomal genes in the order metA-metY. MA-449 expresses the episomal genes in the order metY-metA. Experiments were performed in the presence and absence of IPTG that induces expression of the plasmid borne MetA and MetY genes. FIG. 13 shows a time course of MetA activity. MetA activity was observed only when the genes were in the MetA-MetY (MA-442) configuration in samples from 8 hour and 20 hour cultures. In contrast, MetA activity in extracts from strain MA-449 (MetY-MetA) was not significantly elevated relative to a control sample lacking protein at both 8 hour and 20 hour time points, with and without induction. This data is consistent with Northern blot analysis that showed low expression of metA when the two genes were in the metY-metA orientation.

[0420] Next, sensitivity of extracts from strain MA-442 to feedback inhibition was tested. MA-442 extracts were assayed in the presence of 5 mM methionine, 0.2 mM S-AM, or in the absence of additional methionine or S-AM, and MetA activity was assayed as described above. As shown in FIG. 14, MetA activity was reduced in the presence of 5 mM methionine and 0.2 mM S-AM. Thus, reducing allosteric repression of MetA may enhance MetA activity, allowing production of higher levels of methionine. It is possible that allosteric repression would also be observed at much lower levels of methionine or S-AM. Regardless, the levels tested are physiologically relevant levels in strains engineered for the production of amino acids such as methionine. C. glutamicum strains expressing episomal T. fusca MetA (strains MA-578 and MA-579), or both episomal T. fusca MetA and MetY (strains MA-456 and MA-570) were constructed and extracts were prepared from these strains and assayed for MetA activity. The regulatory elements associated with each episomal gene are listed in Table 12. The rate of MetA activity in extracts of each strain was determined by calculating the change in OD₄₁₂ divided by time per ng of protein. The results of these assays are depicted in FIG. 15, which shows that strain MA-578 exhibited a rate of approximately 2.75 units (change in OD₄₁₂ /time/ng protein) under inducing conditions, whereas the rate under non-inducing conditions was approximately 1. Strain MA-579 exhibited a rate of approximately 2.5 under inducing conditions and a rate of approximately 0.4 under non-inducing conditions. Strain MA-456, which expresses metA and metYunder the control of a constitutive promoter, exhibited a rate of approximately 2.2. Strain MA-570 exhibited a rate of approximately 1 under inducing conditions and a rate of 0.3 under non-inducing conditions. The negative control sample (no protein) exhibited a rate of approximately 0.1. These data show that episomal expression of T. fusca metA in C. glutamicum increases the rate of MetA activity. The increase was similar to the increase observed with episomal expression of C. glutamicum MetA in C. glutamicum.

### EXAMPLE 9

### Quantifying MetY Activity in C. glutamicum Strains Containing Episomal Plasmids

[0421] The in vitro activity of episomal T. fusca MetY was determined in several C. glutamicum strains. MetY activity was assayed in C. glutamicum crude protein extracts using a modified protocol of Kredich and Tomkins (J. Biol. Chem., 241(21):4955-4965, 1966). Crude protein extracts were prepared as described. Briefly, 900 μl of reaction mix (50 mM Tris pH 7.5, 1 mM EDTA, 1 mM sodium sulfide nonahydrate (Na₂S), 0.2mM pyridoxal-5-phosphoric acid (PLP) was mixed with 45 μg of protein extract. At time zero, O-acetyl homoserine (OAH; Toronto Research Chemicals Inc) was added to a final concentration of 0.625 mM. 200 μl of the reaction was removed immediately for the zero time point. The remainder of the reaction was incubated at 30° C. Three 200 μl samples were removed at 10 minute intervals. Immediately after removal from 30° C., the reactions were stopped by the addition of 125 μl 1 mM nitrous acid which nitrosates the thiol groups of homocysteine to form S-nitrosothiol. Five minutes later, 30 μl of 0.5% ammonium sulfamate (removes excess nitrous acid) was added and the sample vortexed. Two minutes later, 400 μl of detection solution (1 part 1% HgCl2 in 0.4N HCl, 4 parts 3.44% % sulfanilamide in 0.4N HCl, 2 parts 0.1% 1-naphthylethylenediamine dihydrochloride in 0.4N HCl) was added and the solution vortexed. In the presence of mercuric ion the S-nitrosothiol rapidly decomposes to give nitrous acid, diazotizing the sulfanilamide, which then couples with the naphthylethylenediamine to give a stable azo dye as a chromaphore. After 5 minutes, the solution was transferred to a microtiter dish and the absorbance at 540 nm was measured. A reaction without protein extract was included as a control.

[0422] The results of the assays are depicted in FIG. 16. Strain MA-456, which expresses episomal wild type T. fusca metA and metY alleles under the control of a constitutive promoter, exhibited a rate of 0.04. Strain MA-570, which expresses episomal wild type T. fusca metA and metY alleles under the control of an inducible promoter, exhibited a rate of approximately 0.038 under inducing conditions, and a rate of less than 0.01 under non-inducing conditions. Thus, expression of heterologous MetY results in enzyme activity that is significantly elevated over that of the endogenous MetY.

TABLE 11
C. glutamicum strains used to determine activity of MetA and MetY proteins,
and impact of overexpression on production of aspartate-derived amino acids.

| | | | relevant | | |
|---|---|---|---|---|---|
| | relevant | | plasmid | episomal | episomal |
| Strain | strain | episomal | regulatory | metY | metA |
| Name | genotype | plasmid | sequence | species | species |
| MA-2 | n/a | n/a | n/a | n/a | n/a |
| (ATCC | | | | | |
| 13032) | | | | | |
| MA-422 | ethionine resistant | n/a | n/a | n/a | n/a |
| | variant of MA-2 | | | | |
| MA-428 | MA-2 derivative | n/a | n/a | n/a | n/a |
| | with Δhom- ΔthrB:: C | | | | |
| | glutamicum gpd promoter - | | | | |
| | S. coelicolor hom | | | | |
| | (G362E)^{a} | | | | |
| MA-442 | MA-428 derivative | MB-4135^{b} | lacIQ-TrcRBS | Cg wild-type | Cg wild-type |
| MA-449 | MA-428 derivative | MB-4138 | lacIQ-TrcRBS | Cg wild-type | Cg wild-type |
| MA-456 | MA-428 derivative | MB-4168 | gpd | Tf wild-type | Tf wild-type |
| MA-570 | MA-428 derivative | MB-4199 | lacIQ-TrcRBS | Tf wild-type | Tf wild-type |
| MA-578 | MA-428 derivative | MB-4205 | gpd | none | Tf wild-type |
| MA-579 | MA-428 derivative | MB-4207 | lacIQ-TrcRBS | none | Tf wild-type |
| MA-622 | mcbRΔ derivative of | n/a | n/a | n/a | n/a |
| | MA-422 | | | | |
| MA-641 | MA-622 derivative | MB-4136 | gpd | Cg wild-type | Cg wild-type |
| MA-699 | MA-622 derivative | n/a | n/a | n/a | n/a |
| MA-721 | MA-622 derivative | MB-4236^{b} | lacIQ-TrcRBS | Cg wild-type | Cg K233A |
| MA-725 | MA-622 derivative | MB-4238^{b} | lacIQ-TrcRBS | Cg D231A | Cg wild-type |
| MA-727 | MA-622 derivative | MB-4239^{b} | lacIQ-TrcRBS | Cg G232A | Cg wild-type |

abbreviations - Cg (Coryneform glutamicum), Tf (Thermobifida fusca), lacIQ-TrcRBS (see above) (lacIQ-Trc regulatory sequence from pTrc99A (Amann et al., Gene (1988) 69:301-315)); gpd (C. glutamicum gpd promoter)
^{a}the endogenous hom(thrA)-thrB locus was replaced with the S. coelicolor hom (G362E) sequence under the C. glutamicum gpd (glyceraldehyde-3-phosphate dehydrogenase) promoter
^{b}in this plasmid the gene order is MetA-MetY. Unless otherwise indicated, in other plasmids the gene order is MetY-MetA

[0423] TABLE 12
Plasmids and oligos used for site directed mutagenesis
to generate MetA and MetY variants.

| Plasmid | oligo 1 | oligo 2 | Gene | wt/variant | Organism |
|---|---|---|---|---|---|
| MB4238 | MO4057 | MO4058 | metY | D231A | C. glutamicum |
| n/a | MO4045 | MO4046 | metY | D244A | T. fusca |
| n/a | MO4041 | MO4042 | metA | D287A | T. fusca |
| n/a | MO4049 | MO4050 | metY | D394A | T. fusca |
| n/a | MO4039 | MO4040 | metA | F269A | T. fusca |
| n/a | MO4047 | MO4048 | metY | F379A | T. fusca |
| MB4239 | MO4059 | MO4060 | metY | G232A | C. glutamicum |
| n/a | MO4043 | MO4044 | metY | G240A | T. fusca |
| n/a | MO4037 | MO4038 | metA | G81A | T. fusca |
| MB4236 | MO4051 | MO4052 | metA | K233A | C. glutamicum |
| MB4135 | n/a | n/a | metA | wt | C. glutamicum |
| MB4135 | n/a | n/a | metY | wt | C. glutamicum |
| MB4210 | n/a | n/a | metY | wt | T. fusca |
| MB4210 | n/a | n/a | metA | wt | T. fusca |

[0424] TABLE 13

Sequences of oligos used for site-directed mutagenesis to generate
MetA and MetY variants.

| | | |
|---|---|---|
| Oligo name | Oligo Sequence | SEQ ID NO: |

| | | |
|---|---|---|
| MO4037 | 5′ GTAGGCCCGGAAGGCCCCGCGCACCCCAGCCCAGGCTGG 3′ | 340 |
| MO4038 | 5′ CCAGCCTGGGCTGGGGTGCGCGGGGCCTTCCGGGCGTAC 3′ | 341 |
| MO4039 | 5′ CCGATGGCCGGGGGCGGGGCCGCTGTCGAGTCGTACCTG 3′ | 342 |
| MO4040 | 5′ CAGGTACGACTCGACAGCGGCCCGGCCCCCGGCCATCGG 3′ | 343 |
| MO4041 | 5′ AAACTCGCCCGCCGGTTCGCCGCGGGCAGCTACGTCGTG 3′ | 344 |
| MO4042 | 5′ GACGACGTAGCTGCCCGCGGCGAACCGGCGGGCGAGTTT 3′ | 345 |
| MO4043 | 5′ CACGGCACCACGATCGCGGCCATCGTGGTGGACGCCGGC 3′ | 346 |
| MO4044 | 5′ GCCGGCGTCCACCACGATGGCCGCGATCGTGGTGCCGTG 3′ | 347 |
| MO4045 | 5′ ATCGCGGGCATCGTGGTGGCCGCCGGCACCTTCGACTTC 3′ | 348 |
| MO4046 | 5′ GAAGTCGAAGGTGCCGGCGGCCACCACGATGCCCGCGAT 3′ | 349 |
| MO4047 | 5′ ATCGAGGCCGGACGCGCCGCCGTGGACGGCACCGAACTG 3′ | 350 |
| MO4048 | 5′ CAGTTCGGTGCCGTCCACGGCGGCGCGTCCGGCGTCGAT 3′ | 351 |
| MO4049 | 5′ CAGCTCGTCAACATCGGTGCCGTGCGCAGCCTCATCGTC 3′ | 352 |
| MO4050 | 5′ GACGATGAGGCTGCGCACGGCACCGATGTTGACGAGCTG 3′ | 353 |
| MO4051 | 5′ GACGAACGCTTCGGCACCGCAGCGCAAAAGAACGAAAAC 3′ | 354 |
| MO4052 | 5′ GTTTTCGTTCTTTTGGGCTGCGGTGCCGAAGCGTTCGTC 3′ | 355 |
| MO4057 | 5′ CTGGGCGGCGTGCTTATCGCCGGCGGAAAGTTCGATTGG 3′ | 356 |
| MO4058 | 5′ CCAATCGAACTTTCCGCCGGCGATAAGCACGCCGCCCAG 3′ | 357 |
| MO4059 | 5′ GGCGGCGTGCTTATCGACGCCGGAAAGTTCGATTGGACT 3′ | 358 |
| MO4060 | 5′ AGTCCAATCGAACTTTCCGGCGTCGATAAGCACGCCGCC 3′ | 359 |

### EXAMPLE 10

### Methods for Producing and Detecting Aspartate-Derived Amino Acids

[0425] For shake flask production of aspartate-derived amino acids, each strain was inoculated from an agar plate into 10 ml of Seed Culture Medium in a 125 ml Erlenmeyer flask. The seed culture was incubated at 250 rpm on a shaker for 16 h at 31° C. A culture for monitoring amino acid production was prepared by performing a 1:20 dilution of the seed culture into 10 ml of Batch Production Medium in 125 ml Erlenmeyer flasks. When appropriate, IPTG was added to a set of the cultures to induce expression of the IPTG regulated genes (final concentration 0.25 mM). Methionine fermentations were carried out for 60-66 h at 31° C. with agitation (250 rpm). For the studies reported herein, in nearly all instances, multiple transformants were fermented in parallel, and each transformant was often grown in duplicate. Most reported data points reflect the average of at least two fermentations with a representative transformant, together with control strains that were grown at the same time.

[0426] After cultivation, amino acid levels in the resulting broths were determined using liquid chromatography-mass spectrometry (LCMS). Approximately 1 ml of culture was harvested and centrifuged to pellet cells and particulate debris. A fraction of the resulting supernatant was diluted 1:5000 into aqueous 0.1% formic acid and injected in 10 μL portions onto a reverse phase HPLC column (Waters Atlantis C18, 2.1×150 mm). Compounds were eluted at a flow rate of 0.350 mL min⁻¹, using a gradient mixture of 0.1% formic acid in acetonitrile (“B”) and 0.1% formic acid in water (“A”), (1% B→50% B over 4 minutes, hold at 50% B for 0.2 minutes, 50% B→1% over 1 minute, hold at 1% for 1.8 minutes). Eluting compounds were detected with a triple-quadropole mass spectrometer using positive electrospray ionization. The instrument was operated in MRM mode to detect amino acids (lysine: 147→84 (15 eV); methionine: 150→104 (12 eV); threonine/homoserine: 120→74 (10 eV); aspartic acid: 134→88 (15 eV); glutamic acid: 148→84 (15 eV); O-acetylhomoserine: 162→102 (12 eV); and homocysteine: 136→90 (15 eV)). On occasion, additional amino acids were quantified using similar methods (e.g. homocystine, glycine, S-adenosylmethionine). Individual amino acids were quantified by comparison with amino acid standards injected under identical conditions. Using this mass spectrometric method it is not possible to distinguish between homoserine and threonine. Therefore, when necessary, samples were also derivatized with a fluorescent label and subjected to liquid chromatography followed by fluorescent detection. This method was used to both resolve homoserine and threonine as well as to confirm concentrations determined using the LCMS method.

| Seed Culture Medium for Production Assays | | |
|---|---|---|
| Glucose | 100 | g/L |
| Ammonium acetate | 3 | g/L |
| KH₂PO₄ | 1 | g/L |
| MgSO₄-7H₂O | 0.4 | g/L |
| FeSO₄-7H₂O | 10 | mg/L |
| MnSO₄-4H₂O | 10 | mg/L |
| Biotin | 50 | μg/L |
| Thiamine-HCl | 200 | μg/L |
| Soy protein | 15 | ml/L |
| Hydrolysate | | |
| (total nitrogen 7%) | | |
| Yeast extract | 5 | g/L |
| pH 7.5 | | |
| Batch Production Medium for Production Assays | | |
| Glucose | 50 | g/L |
| (NH₄)₂SO₄ | 45 | g/L |
| KH₂PO₄ | 1 | g/L |
| MgSO₄-7H₂O | 0.4 | g/L |
| FeSO₄-7H₂O | 10 | mg/L |
| MnSO₄-4H₂O | 10 | mg/L |
| Biotin | 50 | μg/L |
| Thiamine-HCl | 200 | μg/L |
| Soy protein | 15 | ml/L |
| hydrolysate | | |
| (total nitrogen 7%) | | |
| CaCO₃ | 50 | g/L |
| Cobalamin | 1 | μg/ml |
| pH 7.5 | | |

(cobalamin addition not necessary when lysine is the target aspartate-derived amino acid)

### EXAMPLE 11

### Heterologous Wild-Type and Mutant lysC Variants Increase Lysine Production in C. glutamicum and B. lactofermentum.

[0427] Aspartokinase is often the rate-limiting activity for lysine production in corynebacteria. The primary mechanism for regulating aspartokinase activity is allosteric regulation by the combination of lysine and threonine. Heterologous operons encoding aspartokinases and aspartate semi-aldehyde dehydrogenases were cloned from M. smegmatis and S. coelicolor as described in Example 2. Site-directed mutagenesis was used to generate deregulated alleles (see Example 3), and these modified genes were inserted into vectors suitable for expression in corynebacteria (Example 1). The resulting plasmids, and the wild-type counterparts, were transformed into strains, including wild-type C. glutamicum strain ATCC 13032 and wild-type B. lactofermentum strain ATCC 13869, which were analyzed for lysine production (FIG. 17).

[0428] Strains MA-0014, MA-0025, MA-0022, MA-0016, MA-0008 and MA-0019 contain plasmids with the MB3961 backbone (see Example 1). Increased expression, via addition of IPTG to the production medium, of either wild-type or deregulated heterologous lysC-asd operons promoted lysine production. Strain ATCC 13869 is the untransformed control for these strains. The plasmids containing M. smegmatis S301Y, T311I, and G345D alleles were most effective at enhancing lysine production; these alleles were chosen for expression for expression from improved vectors. Improved vectors containing deregulated M. smegmatis alleles were transformed into C. glutamicum (ATCC 13032) to generate strains MA-0333, MA-0334, MA-0336, MA-0361, and MA-0362 (plasmids contain either trcRBS or gpd promoter, MB4094 backbone; see Example 1). Strain ATCC 13032 (A) is the untransformed control for strains MA-0333, MA-0334 and MA-0336. Strain ATCC 13032 (B) is the untransformed control for strains MA-0361 and MA-0362.Strains MA-0333, MA-0334, MA-0336, MA-0361, and MA-0362 all displayed improvement in lysine production. For example, strain MA-0334 produced in excess of 20 g/L lysine from 50 g/L glucose. In addition, the T31 11 and G345D alleles were shown to be effective when expressed from either the trcRBS or gpd promoter.

### EXAMPLE 12

### S. coelicolor hom G362E Variant Increases Carbon Flow to Homoserine in C. glutamicum Strain, MA-0331

[0429] As shown in Example 11, deregulation of aspartokinase increased carbon flow to aspartate-derived amino acids. In principle, aspartokinase activity could be increased by the use of deregulated lysC alleles and/or by elimination of the small molecules that mediate the allosteric regulation (lysine or threonine). FIG. 18 (strain MA-0331) shows that high levels of lysine accumulated in the broth when the hom-thrB locus was inactivated. Hom and thrB encode for homoserine dehydrogenase and homoserine kinase, respectively, two proteins required for the production of threonine. Lysine accumulation was also observed when only the thrB gene was deleted (see strain MA-0933 in FIG. 21 (MA-0933 is one example, though it is not appropriate to directly compare MA-0933 to MA-033 1, as these strains are from different genetic backgrounds).

[0430] In order to increase carbon flow to methionine pathway intermediates, a putative deregulated variant of the S. coelicolor hom gene was transformed into MA-0331. Similar strategies were used to engineer strains containing only the thrB deletion. Strains MA-0384, MA-0386, and MA-0389 contain the S. coelicolor homG362E variant under the control of the rplM, gpd, and trcRBS promoters, respectively. These plasmids also contain an additional substitution (G43S) that was introduced as part of the site-directed mutagenesis strategy; subsequent experiments suggested that the G43S substitution does not enhance Hom activity. FIG. 18 shows the results from shake flask experiments performed using strains MA-0331, MA-0384, MA-0386, and MA-0389, in whichbroths were analyzed for aspartate-derived amino acids, including lysine and homoserine. Strains expressing the S. coelicolor homG362E gene display a dramatic decrease in lysine production as well as a significant increase in homoserine levels. Broth levels of homoserine were in excess of 5 g/L in strains such as MA-0389. It is possible that significant levels of homoserine still remain within the cell or that some homoserine has been converted to additional products. Overexpression of deregulated lysC and other genes downstream of hom, together with hom, may increase production of homoserine-based amino acids, including methionine (see below).

### EXAMPLE 13

### Heterologous Phosphoenolpyruvate Carboxylase (Ppc) Enzymes Increase Carbon Flow to Aspartate-Derived Amino Acids

[0431] Phosphoenolpyruvate carboxylase (Ppc), together with pyruvate carboxylase (Pyc), catalyze the synthesis of oxaloacetic acid (OAA), the citric acid cycle intermediate that feeds directly into the production of aspartate-derived amino acids. The wild-type E. chrysanthemi ppc gene was cloned into expression vectors under control of the IPTG inducible trcRBS promoter. This plasmid was transformed into high lysine strains MA-033 1 and MA-0463 (FIG. 19). Strains were grown in the absence or presence of IPTG and analyzed for production of aspartate-derived amino acids, including aspartate. Strain MA-0331 contains the hom-thrBA mutation, whereas MA-0463 contains the M. smegmatis lysC (T311I)-asd operon integrated at the deleted hom-thrB locus; the lysC-asd operon is under control of the C. glutamicum gpd promoter. FIG. 19 shows that the E. chrysanthemippc gene increased the accumulation of aspartate. This difference was even detectable in strains that converted most of the available aspartate into lysine.

### EXAMPLE 14

### Heterologous Dihydrodipicolinate Synthases (dapA) Enzymes Increase Lysine Production

[0432] Dihydrodipicolinate synthase is the branch point enzyme that commits carbon to lysine biosynthesis rather than to the production of homoserine-based amino acids. DapA converts aspartate-B-semialdehyde to 2,3-dihydrodipicolinate. The wild-type E. chrysanthemi and S. coelicolor dapA genes were cloned into expression vectors under the control of the trcRBS and gpd promoters. The resulting plasmids were transformed into strains MA-0331 and MA-0463, two strains that had already been engineered to produce high levels of lysine (see Example 13). MA-0463 was engineered for increased expression of the M. smegmatis lysC(T311I)-asd operon. This manipulation is expected to drive production of aspartate-B-semialdehyde, the substrate for the DapA catalyzed reaction. Strains MA-0481, MA-0482, MA-0472, MA-0501, MA-0502, MA-0492, MA-0497 were grown in shake flask, and the broths were analyzed for aspartate-derived amino acids, including lysine. As shown in FIG. 20, increased expression of either the E. chrysanthemi or S. coelicolor dapA gene increases lysine production in the MA-0331 and MA-0463 backgrounds. Strain MA-0502 produced nearly 35 g/L lysine in a 50 g/L glucose process. It may be possible to engineer further lysine improvements by constructing deregulated variants of these heterologous dapA genes.

### EXAMPLE 15

### Constructing Strains that Produce High Levels of Homoserine

[0433] Strains that produce high levels of homoserine-based amino acids can be generated through a combination of genetic engineering and mutagenesis strategies. As an example, five distinct genetic manipulations were performed to construct MA-1378, a strain that produces >10 g/L homoserine (FIG. 21). To generate MA-1378, wild-type C. glutamicum was first mutated using nitrosoguanidine (NTG) mutagenesis (based on the protocol described in “A short course in bacterial genetics.” J. H. Miller. Cold Spring Harbor Laboratory Press. 1992, page 143) followed by selection of colonies that grew on minimal plates containing high levels of ethionine, a toxic methionine analog. The endogenous mcbR locus was then deleted in one of the resulting ethionine-resistant strains (MA-0422) using plasmid MB4154 in order to generate strain MA-0622. McbR is a transcriptional repressor that regulates the expression of several genes required for the production of sulfur-containing amino acids such as methionine (see Rey, D. A., Puhler, A., and Kalinowski, J., J. Biotechnology 103:51-65, 2003). In several instances we observed that inactivation of McbR generated strains with increased levels of homoserine-based amino acids. Plasmid MB4084 was utilized to delete the thrB locus in MA-0622, causing the accumulation of lysine and homoserine; methionine and methionine pathway intermediates also accumulated to a lesser degree. MA-0933 resulted from this manipulation. As described above, it is believed that the lysine and homoserine accumulation was a result of deregulation of lysC, via the lack of threonine production. In order to further optimize carbon flow to aspartate-B-semialdehyde and downstream amino acids, MA-0933 was transformed with an episomal plasmid expressing the M. smegmatis lysC (T311I)-asd operon (strain MA-162). High homoserine producing strain MA-1 162 was then mutagenized with NTG, and colonies were selected on minimal medium plates containing a level of methionine methylsulfonium chloride (MMSC) that is normally inhibitory to growth. MA-1378 was one such MMSC-resistant strain.

### EXAMPLE 16

### Heterologous Homoserine Acetyltransferases (MetA) Enzymes Increase Carbon Flow to Homoserine-Based Amino Acids

[0434] MetA is the commitment step to methionine biosynthesis. The wild-type T. fusca metA gene was cloned into an expression vector under the control of the trcRBS promoter. This plasmid was transformed into high homoserine producing strains to test for elevated MetA activity (FIGS. 22 and 23). MA-0428, MA-0933, and MA-1514 were example high homoserine producing strains. MA-0428 is a wild-type ATCC 13032 derivative that has been engineered with plasmid MB4192 (see Example 1) to delete the hom-thrB locus and integrate the gpd-S. coelicolor hom(G362E) expression cassette. MA-1514 was constructed by using novobiocin to allow for loss of the M. smegmatis lysC(T311I)-asd operon plasmid from strain MA-1378. This manipulation was performed to allow for transformation with the episomal plasmid containing the T. fusca metA gene and the kanR selectable marker. Strain MA-1559 resulted from the transformation of strain MA-1514 with the T. fusca metA gene under control of the trcRBS promoter. MA-0933 is as described in Example 15. Induction of T. fusca metA expression in each of these high homoserine strains resulted in accumulation of O-acetylhomoserine in culture broths. For example, strain MA-1559 displayed OAH levels in excess of 9 g/L. Additional manipulations can be performed to elicit conversion of OAH to other products, including methionine.

### EXAMPLE 17

### Effects of metA Variants on Methionine Production in C. glutamicum

[0435] C. glutamicum homoserine acetyltransferase (MetA) variants were generated by site-directed mutagenesis of MetA-encoding DNA (Example 6). C. glutamicum strains MA-0622 and MA-0699 were transformed with a high copy plasmid, MB4236, that encodes MetA with a lysine to alanine mutation at position 233 (MetA (K233A)). This plasmid also contains a wild-type copy of the C. glutamicum metY gene. Strain MA-0699 was constructed by transforming MA-0622 with plasmid MB4192 to delete the hom-thrB locus and integrate the gpd- S. coelicolor hom(G362E) expression cassette. metA and metYare expressed in a synthetic metAY operon under control of a modified version of the trc promoter. The strains were cultured in the presence and absence of IPTG induction, and methionine productivity was assayed. Methionine production from each strain is plotted in FIG. 24. As shown, individual transformants of MA-622 and MA-699, when cultured under inducing conditions, each produced over 3000 μM methionine. MA-699 strains, which express an S. coelicolor hom G362E variant under the control of a constitutive promoter, produced over 3000 μM methionine in the absence of IPTG. IPTG induction resulted in an increased methionine production by 1000-2500 μM. These data show that expression of MetA (K233A) enhances methionine production. Manipulation of methionine biosynthesis at multiple points can further enhance production.

### EXAMPLE 17

### Effects of metY Variants on Methionine Production in C. glutamicum

[0436] C. glutamicum O-acetylhomoserine sulfhydrylase (MetY) variants were generated by site-directed mutagenesis of MetY-encoding DNA (Example 6). C. glutamicum strain MA-622 and strain MA-699 were transformed with a high copy plasmid, MB4238, that encodes MetY with an aspartate to alanine mutation at position 231 (MetY (D231A)). This plasmid also contains the wild-type copy of the C. glutamicum metA gene, expressed as in Example 16. The strains were cultured in the presence and absence of IPTG induction, and methionine productivity was assayed. The methionine production from each strain is plotted in FIG. 25. As shown, individual transformants of MA-622, when cultured under conditions in which expression of MetY (D231A) was induced, each produced over 1800 μM methionine. MA-622 strains showed variation in the levels of methionine produced by individual transformants (i.e., transformants 1 and 2 produced approx. 1800 μM methionine when induced, whereas transformants 3 and 4 produced over 4000 μM methionine when induced). MA-699 strains, which express an S. coelicolor Hom variant, produced approximately 3000 μM methionine in the absence of IPTG. IPTG induction increased methionine production by 1500-2000 μM. These data show that expression of MetY (D231A) enhances methionine production. Methionine production was also enhanced in strain MA-699, relative to MA-622. Expression of MetY (D231A) in strain MA-699 further enhanced methionine production in that strain.

[0437] A second variant allele of metY was expressed in C. glutamicum and assayed for its effect on methionine production. C. glutamicum strain MA-622 and strain MA-699 were transformed with a high copy plasmid, MB4239, that encodes MetY with a glycine to alanine mutation at position 232 (MetY (G232A)). The strains were cultured in the presence and absence of IPTG induction, and methionine productivity was assayed. The methionine production from each strain is plotted in FIG. 26. As shown, individual transformants of MA-622, when cultured under conditions in which expression of MetY (G232A) was induced, each produced over 1700 μM methionine. MA-699 strains produced approximately 3000 μM methionine in the absence of IPTG. IPTG induction resulted in an increased methionine production by 2000-3000 μM. These data show that expression of MetY (G232A) enhances methionine production. Methionine production was also enhanced in strain MA-699, relative to MA-622. Expression of MetY (G232A) in strain MA-699 further enhanced methionine production in that strain.

### EXAMPLE 18

### Methionine Production in C. glutamicum Strains Expressing metA and metY Wild-Type and Mutant Alleles

[0438] Methionine production was assayed in five different C. glutamicum strains. Four of these strains express a unique combination of episomal C. glutamicum metA and metY alleles, as listed in Table 14. A fifth strain, MA-622, does not contain episomal metA or metY alleles. The amount of methionine produced by each strain (g/L) is listed in Table 14.

[0439] The highest levels of methionine production were observed in strains expressing a combination of either a wild-type metA and a variant metY, or a wild-type metY and a variant metA.

TABLE 14
Methionine production in strains expressing
C. glutamicum metA and metY wild-type and mutant alleles

| | | | | methionine |
|---|---|---|---|---|
| Strain | IPTG | metA allele | metY allele | (g/L) |
| MA-622 | − | None | none | 0.00 |
| MA-641 | − | WT | WT | 0.03 |
| MA-721 | − | K233A | WT | 0.00 |
| MA-721 | + | K233A | WT | 0.53 |
| MA-725 | − | WT | D231A | 0 |
| MA-725 | + | WT | D231A | 0.28 |
| MA-727 | − | WT | G232A | 0 |
| MA-727 | + | WT | G232A | 0.37 |

### EXAMPLE 19

### Combinations of Genetic Manipulations, Using Both Heterologous and Native Genes, Elicits Production of Aspartate-Derived Amino Acids

[0440] As described above, gene combinations may optimize corynebacteria for the production of aspartate-derived amino acids. Below are examples that show how multiple manipulations can increase the production of methionine. FIG. 27 shows the production of several aspartate-derived amino acids by strains MA-2028 and MA-2025 along with titers from their parent strains MA-1906 and MA-1907, respectively. MA-1906 was constructed by using plasmid MB4276 to delete the native pck locus in MA-0622 and replace pck with a cassette for constitutive expression of the M. smegmatis lysC(T311I)-asd operon. MA-1907 was generated by similar transformation of MB4276 into MA-0933. MA-2028 and MA-2025 were constructed by transformation of the respective parents with MB4278, an episomal plasmid for inducible expression of a synthetic C. glutamicum metA YH operon (see Example 3). Parent strains MA-1906 and MA-1907 produce lysine or lysine and homoserine, respectively; methionine and methionine pathway intermediates are also produced by these strains. The scale for lysine and homoserine is on the left y-axis; the scale for methionine and O-acetylhomoserine is on the right y-axis. With IPTG induction, MA-2028 showed a decrease in lysine levels and an increase in methionine levels. MA-2025 also displayed an IPTG-dependent decrease in lysine production, together with increased production of methionine and O-acetylhomoserine. Strain MA-1743 is another example of how combinatorial engineering can be employed to generate strains that produce methionine. MA- 1743 was generated by transformation of MA-1667 with metAYHexpression plasmid MB4278. MA-1667 was constructed by first engineering strain MA-0422 (see Example 15) with plasmid MB4084 to delete thrB, and next using plasmid MB4286 to both delete the mcbR locus and replace mcbR with an expression cassette containing trcRBS-T. fusca metA. In this example and in other examples where trcRBS has been integrated at single copy, expression does not appear to be as tightly regulated as seen with the episomal plasmids (as judged by amino acid production). Thismay be due to decreased levels of the laclq inhibitor protein. IPTG induction of strain MA- 1743 elicits production of methionine and pathway intermediates, including O-acetylhomoserine (FIG. 28; the scale for lysine and homoserine is on the left y-axis; the scale for methionine and O-acetylhomoserine is on the right y-axis).

[0441] Strains MA-1688 and MA-1790 are two additional strains that were engineered with multiple genes, including the MB4278 metAYH expression plasmid (see FIG. 29; the scale for lysine and homoserine is on the left y-axis; the scale for methionine and O-acetylhomoserine is on the right y-axis). Transforming MA-0569 with MB4278 generated MA-1688. MA-0569 was constructed by sequentially using MB4192 and MB4165 to first delete the hom-thrB locus and integrate the gpd-S. coelicolor hom(G362E) expression cassette and then delete mcbR. MA-1790 construction required several steps. First, a NTG mutant derivative of MA-0428 was identified based on its ability to allow for growth of a Salmonella metE mutant. In brief, a population of mutagenized MA-0428 cells was plated onto a minimal medium containing threonine and a lawn (>106 cells of the Salmonella metE mutant). The Salmonella metE mutant requires methionine for growth. After visual inspection, the corynebacteria colonies (e.g. MA-0600) surrounded by a halo of Salmonella growth were isolated and subjected to shake flask analysis. Strain MA-600 was next mutagenized to ethionine resistance as described above, and one resulting strain was designated MA-0993. The mcbR locus was then deleted from MA-0993 using plasmid MB4165, and MA-1421 was the product of this manipulation. Transformation of MA-1421 with MB4278 generated MA-1 790. FIG. 29 shows that IPTG induction stimulates methionine production in both MA-1688 and MA-1790, and decreases in lysine and homoserine titers.

[0442] FIG. 30 shows the metabolite levels of strain MA-1668 and its parent strains. The scale for lysine and homoserine is on the left y-axis; the scale for methionine and O-acetylhomoserine is on the right y-axis. Strain MA-1668 was generated by transformation of MA-0993 with plasmid MB4287. Manipulation with MB4287 results in deletion of the mcbR locus and replacement with C. glutamicum metA(K233A)-metB. Strain MA-1668 produces approximately 2 g/L methionine, with decreased levels of lysine and homoserine relative to its progenitor strains. Strain MA-1 668 is still amenable to further rounds of molecular manipulation.

[0443] Table 15 lists the strains used in these studies. The ‘::’ nomenclature indicates that the expression construct following the ‘::’ is integrated at the named locus prior to the ‘::’. EthR6 and EthR10 represent independently isolated ethionine resistant mutants. The Mcf3 mutation confers the ability to enable a Salmonella metE mutant to grow (see example 19). The Mms13 mutation confers methionine methylsulfonium chloride resistance (see example 15).

TABLE 15
Strains used in studies described herein.

| Name | Strain Genotype |
|---|---|
| MA-0002 | is ATCC 13032 |
| MA-0003 | is ATCC 13869 |
| MA-0008 | lacIq-trc-S. coelicolor lysC-asd(A191V) (episomal) |
| MA-0014 | lacIq-trc-M. smegmatis lysC-asd (episomal) |
| MA-0016 | lacIq-trc-M. smegmatis lysC (G345D)-asd (episomal) |
| MA-0019 | lacIq-trc-S. coelicolor lysC (S314I)-asd (A191V) (episomal) |
| MA-0022 | lacIq-trc-M. smegmatis lysC (T311I)-asd (episomal) |
| MA-0025 | lacIq-trc-M. smegmatis lysC (S301Y)-asd (episomal) |
| MA-0331 | Δhom-ΔthrB |
| MA-0333 | lacIq-trcRBS-M. smegmatis lysC (S301Y)-asd (episomal) |
| MA-0334 | lacIq-trcRBS-M. smegmatis lysC (T311I)-asd (episomal) |
| MA-0336 | lacIq-trcRBS-M. smegmatis lysC (G345D)-asd (episomal) |
| MA-0361 | gpd-M. smegmatis lysC (T311I)-asd (episomal) |
| MA-0362 | gpd-M. smegmatis lysC (G345D)-asd (episomal) |
| MA-0384 | Δhom-ΔthrB + rplM-S. coelicolor hom (G362E; G43S) (episomal) |
| MA-0386 | Δhom-ΔthrB + gpd-S. coelicolor hom (G362E; G43S) (episomal) |
| MA-0389 | Δhom-ΔthrB + lacIq-trcRBS-S. coelicolor hom (G362E; G43S; K19N) (episomal) |
| MA-0422 | EthR6 |
| MA-0428 | Δhom-ΔthrB::gpd-S. coelicolor hom (G362E; G43S) |
| MA-0442 | Δhom-ΔthrB + gpd-S. coelicolor hom (G362E; G43S) + lacIq-trcRBS-C. |
| | glutamicum metA-RBS-C. glutamicum metY (episomal) |
| MA-0449 | Δhom-ΔthrB + gpd-S. coelicolor hom (G362E; G43S) + lacIq-trcRBS-C. |
| | glutamicum metY-RBS-C. glutamicum metA (episomal) |
| MA-0456 | Δhom-ΔthrB::gpd-S. coelicolor hom (G362E; G43S) + gpd-T. fusca metY-RBS-T. |
| | fusca metA (episomal) |
| MA-0463 | Δhom-ΔthrB::gpd-M. smegmatis lysC (T311I)-asd |
| MA-0466 | Δhom-ΔthrB + lacIq-trcRBS-E. chrysanthemi ppc (episomal) |
| MA-0472 | Δhom-ΔthrB + gpd-S. coelicolor dapA (episomal) |
| MA-0477 | Δhom-ΔthrB + lacIq-trcRBS-S. coelicolor dapA (episomal) |
| MA-0481 | Δhom-ΔthrB + gpd-E. chrysanthemi dapA (episomal) |
| MA-0482 | Δhom-ΔthrB + lacIq-trcRBS-E. chrysanthemi dapA (episomal) |
| MA-0486 | Δhom-ΔthrB::gpd-M. smegmatis lysC (T311I)-asd + lacIq-trcRBS-E. |
| | chrysanthemi ppc (episomal) |
| MA-0492 | Δhom-ΔthrB::gpd-M. smegmatis lysC (T311I)-asd + gpd-S. coelicolor dapA |
| | (episomal) |
| MA-0497 | Δhom-ΔthrB::gpd-M. smegmatis lysC (T311I)-asd + lacIq-trcRBS-S. coelicolor |
| | dapA (episomal) |
| MA-0501 | Δhom-ΔthrB::gpd-M. smegmatis lysC (T311I)-asd + gpd-E. chrysanthemi dapA |
| | (episomal) |
| MA-0502 | Δhom-ΔthrB::gpd-M. smegmatis lysC (T311I)-asd + lacIq-trcRBS-E. |
| | chrysanthemi dapA (episomal) |
| MA-0569 | ΔmcbR + Δhom-ΔthrB::gpd-S. coelicolor hom (G362E; G43S) |
| MA-0570 | Δhom-ΔthrB + gpd-S. coelicolor hom (G362E; G43S) + lacIq-trcRBS-T. fusca |
| | metY-RBS-T. fusca metA (episomal) |
| MA-0578 | Δhom-ΔthrB + gpd-S. coelicolor hom (G362E; G43S) + gpd-T. fusca metA |
| | (episomal) |
| MA-0579 | Δhom-ΔthrB + gpd-S. coelicolor hom (G362E; G43S) + lacIq-trcRBS-T. fusca |
| | metA (episomal) |
| MA-0600 | Δhom-ΔthrB + gpd-S. coelicolor hom (G362E; G43S) + Mcf3 |
| MA-0622 | ΔmcbR + EthR6 |
| MA-0641 | ΔmcbR + EthR6 + gpd-C. glutamicum metA-RBS-C. glutamicum metY (episomal) |
| MA-0699 | ΔcbR + EthR6 + Δhom-ΔthrB::gpd-S. coelicolor hom (G362E) |
| MA-0721 | ΔmcbR + EthR6 + lacIq-trcRBS-C. glutamicum metA (K233A)-RBS-C. |
| | glutamicum metY (episomal) |
| MA-0725 | ΔmcbR + EthR6 + lacIq-trcRBS-C. glutamicum metA-RBS-C. glutamicum metY |
| | (D231A) (episomal) |
| MA-0727 | ΔmcbR + EthR6 + lacIq-trcRBS-C. glutamicum metA-RBS-C. glutamicum metY |
| | (G232A) (episomal) |
| MA-0933 | ΔthrB + ΔmcbR + EthR6 |
| MA-0993 | Δhom-ΔthrB::gpd-S. coelicolor hom (G362E; G43S) + Mcf3 + EthR10 |
| MA-1162 | ΔthrB + ΔmcbR + EthR6 + lacIq-trcRBS-M. smegmatis lysC (T311I)-asd (episomal) |
| MA-1351 | ΔthrB + ΔmcbR + EthR6 + lacIq-trcRBS-T. fusca metA (episomal) |
| MA-1378 | ΔthrB + ΔmcbR + EthR6 + Mms13 + lacIq-trcRBS-M. smegmatis lysC (T311I)-asd |
| MA-1421 | Δhom-ΔthrB::gpd S. coelicolor hom (G362E; G43S) + ΔmcbR + Mcf3 + EthR10 |
| MA-1514 | ΔthrB + ΔmcbR + EthR6 + Mms13 |
| MA-1559 | ΔthrB + ΔmcbR + EthR6 + Mms13 + lacIq-trcRBS-T. fusca metA (episomal) |
| MA-1667 | ΔthrB + EthR6 + ΔmcbR::lacIq-trcRBS-T. fusca metA (episomal) |
| MA-1668 | Δhom-ΔthrB::gpd-S. coelicolor hom (G362E; G43S) + ΔmcbR::lacIq-trcRBS- |
| | C. glutamicum metA (K233A)-RBS-C. glutamicum metB + Mcf3 + EthR10 |
| MA-1688 | ΔmcbR + Δhom-ΔthrB::gpd-S. coelicolor hom (G362E; G43S) + lacIq-trcRBS-C. |
| | glutamicum metA-RBS-C. glutamicum metY-RBS-C. glutamicum metH |
| | (episomal) |
| MA-1743 | ΔthrB + ΔmcbR::lacIq-trcRBS-T. fusca metA + EthR6 + lacIq-trcRBS-C. |
| | glutamicum metA-RBS-C. glutamicum metY-RBS-C. glutamicum metH |
| | (episomal) |
| MA-1790 | Δhom-ΔthrB::gpd-S. coelicolor hom |
| | (G362E; G43S) + ΔmcbR + Mcf3 + EthR10 + lacIq-trcRBS-C. glutamicum metA- |
| | RBS-C. glutamicum-metY-RBS-C. glutamicum-metH (episomal) |
| MA-1906 | ΔmcbR + EthR6 + Δpck::gpd-M. smegmatis lysC (T311I)-asd |
| MA-1907 | ΔmcbR + EthR6 + Δpck::gpd-M. smegmatis lysC (T311I)-asd + ΔthrB |
| MA-2025 | ΔmcbR + EthR6 + Δpck::gpd-M. smegmatis lysC (T311I)-asd + ΔthrB + lacIq- |
| | trcRBS-C. glutamicum metA-RBS-C. glutamicum metY-RBS-C. glutamicum |
| | metH (episomal) |
| MA-2028 | ΔmcbR + EthR6 + Δpck::gpd-M. smegmatis lysC (T311I)-asd + lacIq-trcRBS-C. |
| | glutamicum metA-RBS-C. glutamicum metY-RBS-C. glutamicum metH |
| | (episomal) |

[0444] TABLE 16

Amino acid sequences of exemplary heterologous proteins for amino acid
production in Escherichia coli and coryneform bacteria.
The NC number under the Gene column corresponds to the
Genbank ® protein record for the corresponding Corynebacterium
glutamicum gene.

| | | | | |
|---|---|---|---|---|
| | | GenBank ® | | SEQ |
| Gene | Organism | Protein ID | Amino Acid Sequence | ID NO: |

| | | | | |
|---|---|---|---|---|
| lysC | Mycobacterium | CAA78984 | MALVVQKYGGSSVADAERIRRVAERIVETKKAGNDVVVVVSA | 1 |
| | smegmatis | | MGDTTDDLLDLARQVSPAPPPREMDMLLTAGERISNALVAMA | |
| | | | IESLGAQARSFTGSQAGVITTGTHGNAKIIDVTPGRLRDALD | |
| | | | EGQIVLVAGFQGVSQDSKDVTTLGRGGSDTTAVAVAAALDAD | |
| | | | VCEIYTDVDGIFTADPRIVPNARHLDTVSFEEMLEMAACGAK | |
| | | | VLMLRCVEYARRYNVPIHVRSSYSDKPGTIVKGSIEDIPMED | |
| | | | AILTGVAHDRSEAKVTVVGLPDVPGYAAKVFRAVAEADVNID | |
| | | | MVLQNISKIEDGKTDITFTCARDNGPRAVEKLSALKSEIGFS | |
| | | | QVLYDDHIGKVSLIGAGMRSHPGVTATFCEALAEAGINIDLI | |
| | | | STSEIRISVLIKDTELDKAVSALHEAFGLGGDDEAVVY | |
| | | | AGTGR | |
| lysC | Amycolatopsis | AAD49567 | MALVVQKYGGSSLESADRIKRVAERIVATKKAGNDVVVVCSA | 2 |
| | mediterranei | | MGDTTDELLDLAQQVNPAPPEREMDMLLTAGERISNSLVAMA | |
| | | | IAAQGAEAWSFTGSQAGVVTTSVHGNARIIDVTPSRVTEALD | |
| | | | QGYIALVAGFQGVAQDTKDITTLGRGGSDTTAVALAAALNAD | |
| | | | VCEIYSDVDGVYTADPRVVPDAKKLDTVTYEEMLELAASGSK | |
| | | | ILHLRSVEYARRYGVPIRVRSSYSDKPGTTVTGSIEEIPVEQ | |
| | | | ALITGVAHDRSEAKITVTGVPDHTGAAARIFRVIADAEIDID | |
| | | | MVLQNVSSTVSGRTDITFTLSKANGAKAVKELEKVQAEIGFE | |
| | | | SVLYDDHVGKVSVVGAGMRSHPGVTATFCEALAEAGVNIEII | |
| | | | NTSEIRISVLIRDAQLDDAVRAIHEAFELGGDEEAVV | |
| | | | YAGSGR | |
| lysC | Streptomyces | CAB45482 | MGLVVQKYGGSSVADAEGIKRVAKRIVEAKKNGNQVVAVVSA | 3 |
| | coelicolor | | MGDTTDELIDLAEQVSPIPAGRELDMLLTAGERISMALLAMA | |
| | | | IKNLGHEAQSFTGSQAGVITDSVHNKARIIDVTPGRIRTSVD | |
| | | | EGNVAIVAGFQGVSQDSKDITTLGRGGSDTTAVALAAALDAD | |
| | | | VCEIYTDVDGVFTADPRVVPKAKKIDWISFEDMLELAASGSK | |
| | | | VLLHRCVEYARRYNIPIHVRSSFSGLQGTWVSSEPIKQGEKH | |
| | | | VEQALISGVAHDTSEAKVTVVGVPDKPGEAAAIFRAIADAQV | |
| | | | NIDMVVQNVSAASTGLTDISFTLPKSEGRKAIDALEKNRPGI | |
| | | | GFDSLRYDDQIGKISLVGAGMKSNPGVTADFFTALSDAGVNI | |
| | | | ELISTSEIRISVVTRKDDVNEAVRAVHTAFGLDSDSDEAVVY | |
| | | | GGTGR | |
| lysC | Thermobifida | ZP_00057166 | MNLRSLDWLVDYREPDSSGAPTVALIVQKYGGSSVADADAIK | 4 |
| | fusca | | RVAERIVAQKKAGYDVVVVVSAMGDTTDELLDLAKQVSPLPP | |
| | | | GRELDMLLTAGERISMALVAMAIGNLGYEARSFTGSQAGVIT | |
| | | | TSLHGNAKIIDVTPGRIRDALAEGAICIVAGFQGVSQDSKDI | |
| | | | TTLGRGGSDTTAVALAAALNADLCEIYTDVDGVFTADPRIVP | |
| | | | SARRIPQISYEEMLEMAASGAKILHLRCVEYARRYNIPLNVR | |
| | | | SSFSQKPGTWVVSEVEETEGMEQPIISGVAHDRSEAKITVVG | |
| | | | VPDRVGEAAAIFKALADAEINVDMIVQNVSAASTSRTDISFT | |
| | | | LPADSGQNALAALKKIQDKVGFESLLYNDRIGKVSLIGAGMR | |
| | | | SYPGVTARFFDAVAREGINIEMISTSEIRISIVVAQDDVDAA | |
| | | | VAAAHREFQLDADQVEAVVYGGTGR | |
| lysC | Erwinia | | MSANTDNSLIIAKFGGTSVADFDAMNRSADIVLSDAQVRVVV | 5 |
| | chrysenthemi | | LSASAGVTNLLVALAEGLPPSERTAQLEKLRQTQYAIIDRLN | |
| | | | QPAVIREEIDRMLDNVARLSEAAALATSNALTDELVSHGELI | |
| | | | STLLFVEILRERNVAAEWFDVRKIMRTNDRFGRAEPDCDALG | |
| | | | ELTRSQLTPRLAQGLIITQGFIGSEAKGRTTTLGRGGSDYTA | |
| | | | ALLGEALHASRIDIWTDVPGIYTTDPRVVPSAHRIDQITFEE | |
| | | | AAEMATFGAKVLHPATLLPAVRSDIPVFVGSSKDPAAGGTLV | |
| | | | CNNTENPPLFPALALRRKQTLLTLHSLNNLHARGFLAEVFSI | |
| | | | LARHNISVDLITTSEVNVALTLDTTGSTSTGDSLLSSALLTE | |
| | | | LSSLCRVEVEENMSLVALIGNQLSQACGVGKEVFGVLEPFNI | |
| | | | RLICYGASSHNLCFLVPSSDAEQVVQTLHHNLFE | |
| lysC | Shewanella | AAN56424 | MLEKRKLSGSKLFVKKFGGTSVGSIERIEVVAEQIAKSAHSG | 6 |
| | oneidensis | | EQQVLVLSAMAGETNRLFALAAQIDPPASARELDMLVSTGEQ | |
| | | | ISIALMAMALQRRGIKARSLTGDQVQIHTNSQFGRASIESVD | |
| | | | TAYLTSLLEQGIVPIVAGFQGIDPNGDVTTLGRGGSDTTAVA | |
| | | | LAAALRADECQIFTDVSGVFTTDPNIDSSARRLDVIGFDVML | |
| | | | EMAKLGAKVLHPDSVEYAQRFKVPLRVLSSFEAGQGTLIQFG | |
| | | | DESELAMAASVQGIAINKALATLTIEGLFTSSERYQALLACL | |
| | | | ARLEVDVEFITPLKLNEISPVESVSFMLAEAKVDILLHELEV | |
| | | | LSESLDLGQLIVERQRAKVSLVGKGLQAKVGLLTKMLDVLGN | |
| | | | ETIHAKLLSTSESKLSTVIDERDLHKAVRALHHAFELNKV | |
| lysC | Corynebacterium | CAD89081 | MALVVQKYGGSSLESAERIRNVAERIVATKKAGNDVVVVCSA | 202 |
| | glutamicum | | MGDTTDELLELAAAVNPVPPAREMDMLLTAGERISNALVAMA | |
| | | | IESLGAEAQSFTGSQAGVLTTERHGNARIVDVTPGRVREALD | |
| | | | EGKICIVAGFQGVNKETRDVTTLGRGGSDTTAVALAAALNAD | |
| | | | VCEIYSDVDGVYTADPRIVPNAQKLEKLSFEEMLELAAVGSK | |
| | | | ILVLRSVEYAPAFNVPLRVRSSYSNDPGTLIAGSMEDIPVEE | |
| | | | AVLTGVATDKSEAKVTVLGISDKPGEAAKVFPALADAEINID | |
| | | | MVLQNVSSVEDGTTDITFTCPRSDGRRAMEILKKLQVQGNWT | |
| | | | NVLYDDQVGKVSLVGAGMKSHPGVTAEFMEALRDVNVNIELI | |
| | | | STSEIRISVLIREDDLDAAAPALHEQFQLGGEDEAV | |
| | | | VYAGTGR | |
| asparto | Escherichia | AAA24095 | MSEIVVSKFGGTSVADFDAMNRSADIVLSDANVRLVVLSASA | 203 |
| kinase | coli | | GITNLLVALAEGLEPGERFEKLDAIRNIQFAILERLRYPNVI | |
| | | | REEIERLLENITVLAEAAALATSPALTDELVSHGELMSTLLF | |
| | | | VEILRERDVQAQWFDVRKVMRTNDRFGRAEPDIAALAELAAL | |
| | | | QLLPRLNEGLVITQGFIGSENKGRTTTLGRGGSDYTAALLAE | |
| | | | ALHASRVDIWTDVPGIYTTDPRVVSAAKRIDEIAFAEAAEMA | |
| | | | TFGAKVLHPATLLPAVRSDIPVFVGSSKDPRAGGTLVCNKTE | |
| | | | NPPLFRALALRRNQTLLTLHSLNMLHSRGFLAEVFGILARHN | |
| | | | ISVDLITTSEVSVALTLDTTGSTSTGDTLLTQSLLMELSALC | |
| | | | RVEVEEGLALVALIGNDLSKACGVGKEVFGVLEPFNIRMICY | |
| | | | GASSHNLCFLVPGEDAEQVVQKLHSNLFE | |
| asd | Corynebacterium | CAA40504 | MTTIAVVGATGQVGQVMRTLLEERNFPADTVRFFASPRSAGR | 204 |
| | glutamicum | | KIEFRGTEIEVEDITQATEESLKDIDVALFSAGGTASKQYAP | |
| | | | LFAAAGATVVDNSSAWRKDDEVPLIVSEVNPSDKDSLVKGII | |
| | | | ANPNCTTMAANPVLKPLHDAAGLVKLHVSSYQAVSGSGLAGV | |
| | | | ETLAKQVAAVGDHNVEFXTHDGQAADAGDVGPYVSPIAYNVLP | |
| | | | FAGNLVDDGTFETDEEQKLRNESRKILGLPDLKVSGTCVRVP | |
| | | | VFTGHTLTIHAEFDKAITVDQAQEILGAASGVKLVDVPTPLA | |
| | | | AAGIDESLVGRIRQDSTVDDNRGLVLVVSGDNLRKGAALNTI | |
| | | | QIAELLVK | |
| asd | Escherichia | P00353 | MKNVGFIGWRGMVGSVLMQRMVEERDFDAIRPVFFSTSQLGQ | 205 |
| | coli | | AAPSFGGTTGTLQDAFDLEALKALDIIVTCQGGDYTNEIYPK | |
| | | | LRESGWQGYWIDAASSLRMKDDAIIILDPVNQDVITDGLNNG | |
| | | | IRTFVGGNCTVSLMLMSLGGLFANDLVDWVSVATYQAASGGG | |
| | | | ARHMRELLTQMGHLYGHVADELATPSSATLDIERKVTTLTRS | |
| | | | GELPVDNFGVPLAGSLIPWIDKQLDNGQSREEWKGQAETNKI | |
| | | | LNTSSVIPVDGLCVRVGALRCHSQAFTIKLKKDVSIPTVEEL | |
| | | | LAAHNPWAKVVPNDREITMRELTPAAVTGTLTTPVGRLRKLN | |
| | | | MGPEFLSAFTVGDQLLWGAAEPLRRMLRQLA | |
| ppc | Thermobifida | ZP_00058586 | MTRDSARQEMPDQLRRDVRLLGEMLGTVLAESGGQDLLDDVE | 7 |
| | fusca | | RLRRAVIGAREGTVEGKEITELVASWPLERAKQVARAFTVYF | |
| | | | HLVNLAEEHHRMRALRERDDAATPQRESLAAAVHSIREDAGP | |
| | | | ERLRELIAGMEFHPVLTAHPTEARRRAVSTAIQRISAQLERL | |
| | | | HAAHPGSGAEAEARRRLLEEIDLLWRTSQLRYTKMDPLDEVR | |
| | | | TAMAAFDETIFTVIPEVYRSLDPALDPEGCGRRPALAKAFVR | |
| | | | YGSWIGGDRDGNPFVTHEVTREAITIQSEHVLRALENACERI | |
| | | | GRTHTEYTGLTPPSAELRAALSSARAAYPRLMQEIIKRSPNE | |
| | | | PHRQLLLLAAERLRATRLRNADLGYPNPEAFLADLRTVQESL | |
| | | | AAAGAVRQAYGELQNLIWQAETFGFHLAELEIRQHSAVHAAA | |
| | | | LKEIRAGGELSERTEEVLATLRVVAWIQERFGVEACRRYIVS | |
| | | | FTQSADDIAAVYELAEHAMPPGKAPILDVIPLFETGADLDAA | |
| | | | PQVLDGMLRLPAVQRRLEQTGRRMEVMLGYSDSAKDVGPVSA | |
| | | | TLRLYDAQARLAEWAREHDIKLTLFHGRGGALGRGGGPANRA | |
| | | | VLAQAPGSVDGRFKVTEQGEVIFARYGQRAIAHRHIEQVGHA | |
| | | | VLMASTESVQRRAAEAAARFRGMADRIAEAAHAAYRALVDTE | |
| | | | GFAEWFSRVSPLEELSELRLGSRPARRSAARGLDDLRAIPWV | |
| | | | FAWTQTRVNLPGWYGLGSGLAAVDDLEALHTAYKEWPLFASL | |
| | | | LDNAEMSLAKTDRVIAERYLALGGRPELTEQVLAEYDRTREL | |
| | | | VLKVTRHTRLLENRRVLSRAVDLRNPYVDALSHLQLRALEAL | |
| | | | RTGEADRLSEEDRNHLERLLLLSVNGVAAGLQNTG | |
| ppc | Mycobacterium | CAC30086 | MVEFSDAILEPIGAVQRTRVGREATEPMRADIRLLGTILGDT | 8 |
| | leprae (can be | | LREQNGDEVFDLVERVRVESFRVRRSEIDRADMARMFSGLDI | |
| | used to clone | | HLAIPIIRAFSHFALLANVAEDIHRERRRHIHLDAGEPLRDS | |
| | M. smegmatis | | SLAATYAKLDLAKLDSATVADALTGAVVSPVITAHPTETRRR | |
| | gene) | | TVFVTQRRITELMRLHAEGHTETADGRSIERELRRQILTLWQ | |
| | | | TALIRLARLQISDEIDVGLRYYSAALFHVIPQVNSEVRNALR | |
| | | | ARWPDAELLSGPILQPGSWIGGDRDGNPNVTADVVRRATGSA | |
| | | | AYTVVAHYLAELTHLEQELSMSARLITVTPELATLAASCQDA | |
| | | | ACADEPYRRALRVIRGRLSSTAAHILDQQPPNQLGLGLPPYS | |
| | | | TPAELCADLDTIEASLCTHGAALLADDRLALLREGVGVFGFH | |
| | | | LCGLDMRQNSDVHEEVVAELLAWAGMHQDYSSLPEDQRVKLL | |
| | | | VAELGNRRPLVGDRAQLSDLARGELAVLAAAAHAVELYGSAA | |
| | | | VPNYIISMCQSVSDVLEVAILLKETGLLDASGSQPYCPVGIS | |
| | | | PLFETIDDLHNGAAILHAMLELPLYRTLVAARGNWQEVMLGY | |
| | | | SDSNKDGGYLAANWAVYRAELALVDVARKTGIRLRLFHGRGG | |
| | | | TVGRGGGPSYQAILAQPPGAVNGSLRLTEQGEVIAAKYAEPQ | |
| | | | IARRNLESLVAATLESTLLDVEGLGDAAESAYAILDEvAGLA | |
| | | | RRSYAELVNTPGFVDYFQASTPVSEIGSLNIGNRPTSRKPTT | |
| | | | SIADLRAIPWVLAWSQSRVMLPGWYGTGSAFQQWVAAGPESE | |
| | | | SQRVEMLHDLYQRWPFFRSVLSNMAQVLAKSDLGLAARYAEL | |
| | | | VVDEALRRRVFDKIADEHRRTIAIHKLITGHDDLLADNPALA | |
| | | | RSVFNRFPYLEPLNHLQVELLRRYRSGHDDEMVQRGILLTMN | |
| | | | GLASALRNSG | |
| ppc | Streptomyces | Q9RNU9 | MSSADDQTTTTTSSELRADIRRLGDLLGETLVRQEGPELLEL | 9 |
| | coelicolor | | VEKVRRLTREDGEAAAELLRGTELETAAKLVRAFSTYFHLAN | |
| | | | VTEQVHRGRELGAKRAAEGGLLARTADRLKDADPEHLRETVR | |
| | | | NLNVRPVFTAHPTEAARRSVLNKLRRIAALLDTPVNESDRRR | |
| | | | LDTRLAENIDLVWQTDELRVVRPEPADEARNAIYYLDELHLG | |
| | | | AVGDVLEDLTAELERAGVKLPDDTRPLTFGTWIGGDRDGNPN | |
| | | | VTPQVTWDVLILQHEHGINDALEMIDELRGFLSNSIRYAGAT | |
| | | | EELLASLQADLERLPEISPRYKRLNAEEPYRLKATCIRQKLE | |
| | | | NTKQRLAKGTPHEDGRDYLGTAQLIDDLRIVQTSLREHRGGL | |
| | | | FADGRLARTIRTLAAFGLQLATMDVREHADAHHHALGQLFDR | |
| | | | LGEESWRYADMPREYRTKLLAKELRSRRPLAPSPAPVDAPGE | |
| | | | KTLGVFQTVRRALEVFGPEVIESYIISMCQGADDVFAAAVLA | |
| | | | REAGLIDLHAGWAKIGIVPLLETTDELKAADTILEDLLADPS | |
| | | | YRRLVALRGDVQEVMLGYSDSSKFGGITTSQWEIHRAQRRLR | |
| | | | DVAHRYGVRLRLFHGRGGTVGRGGGPTHDAILAQPWGTLEGE | |
| | | | IKVTEQGEVISDKYLIPALARENLELTVAATLQASALHTAPR | |
| | | | QSDEALARWDAANDVVSDAAHTAYRHLVEDPDLPTYFLASTP | |
| | | | VDQLADLHLGSRPSRRPGSGVSLDGLRAIPWVFGWTQSRQIV | |
| | | | PGWYGVGSGLKALREAGLDTVLDEMHQQWHFFRNFISNVEMT | |
| | | | LAKTDLRIAQHYVDTLVPDELKHVFDTIKAEHELTVAEVLRV | |
| | | | TGESELLDADPVLKQTFTIRDAYLDPISYLQVALLGRQREAA | |
| | | | AANEDPDPLLARALLLTVNGVAAGLRNTG | |
| ppc | Erwinia | | MNEQYSAMRSNVSMLGKLLGDTIKDALGANILERVETIRKLS | 10 |
| | chrysanthemi | | KASPAGSETHRQELLTTLQNLSNDELLPVARAFSQFLNLTNT | |
| | | | AEQYNSISPHGEAASNPEALATVFRSLKSRDNLSDKDIRDAV | |
| | | | ESLSIELVLTAHPTEITRRTLIHKLVEVNTCLKQLDHDDLAD | |
| | | | YERHQIMRRLRQLIAQYWHTDEIRKIRPTPVDEAKWGFAVVE | |
| | | | NSLWEGVPAFLRELDEQMGKELGYRLFVDSVPVRFTSWMGGD | |
| | | | RDGNPNVTSEVTRRVLLLSRWKAADLFLRDVQVLVSELSMTT | |
| | | | CTPELQQLAGGDEVQEPYRELMKALRAQLTATLDYLDARLKD | |
| | | | EQRMPPKDLLVTNEQLWEPLYACYQSLHACGMGIIADGQLLD | |
| | | | TLRRVRCFGVPLVRIDVRQESTRHTDALAEITRYLGLGDYES | |
| | | | WSESDKQAFLIRELNSKRPLLPRQWEPSADTQEVLETCRVIA | |
| | | | ETPRDSIAAYVISMARTPSDVLAVHLLLKEAGCPYALPVAPL | |
| | | | FETLDDLNNADSVMIQLLNIDWYRGFIQGKQMVMIGYSDSAK | |
| | | | DAGVMAASWAQYRAQDALIKTCEKYGIALTLFHGRGGSIGRG | |
| | | | GAPAHAALLSQPPGSLKGGLRVTEQGEMIRFKFGLPEVTISS | |
| | | | LSLYTSAILEANLLPPPEPKQEWHHIMNELSRISCDMYRGYV | |
| | | | RENPDFVPYFRAATPELELGKLPLGSRPAKRRPNGGVESLRA | |
| | | | IPWIFAWTQNRLMLPAWLGAGAALQKVIDDGHQNQLEAMCRD | |
| | | | WPFFSTRIGMLEMVFAKAIJLWLAEYYDQRLVDEKLWSLGKQL | |
| | | | REQLERDIKAVLTISNDDHLMADLPWIAESIALRNVYTDPLN | |
| | | | VLQAELLHRSRQQETLDPQVEQALMVTIAGVAAGMRNTG | |
| ppc | Coryne- | P12880 | MTDFLRDDIRFLGQILGEVIAEQEGQEVYELVEQARLTSFDI | 206 |
| | bacterium | | AKGNAEMDSLVQVFDGITPAKATPIARAFSHFALLANLAEDL | |
| | glutamicum | | YDEELREQALDAGDTPPDSTLDATWLKLNEGNVGAEAVADVL | |
| | | | RNAEVAPVLTAHPTETRRRTVFDAQKWITTHMRERHALQSAE | |
| | | | PTARTQSKLDEIEKNIRRRITILWQTALIRVARPRIEDEIEV | |
| | | | GLRYYKLSLLEEIPRINRDVAVELRERFGEGVPLKPVVKPGS | |
| | | | WIGGDHDGNPYVTAETVEYSTHPAAETVLKYYARQLHSLEHE | |
| | | | LSLSDRMNKVTPQLLALADAGHNDVPSRVDEPYRRAVHGVRG | |
| | | | RILATTAELIGEDAVEGVWFKVFTPYASPEEFLNDALTIDHS | |
| | | | LRESKDVLIADDRLSVLISAlESFGFNLYALDLRQNSESYED | |
| | | | VLTELFERAQVTANYRELSEAEKLEVLLKELRSPRPLIPHGS | |
| | | | DEYSEVTDRELGIFRTASEAVKKFGPRMVPHCIISMASSVTD | |
| | | | VLEPMVLLKEFGLIAANGDNPRGTVDVIPLFETIEDLQAGAG | |
| | | | ILDELWKIDLYRNYLLQRDNVQEVMLGYSDSMWGGYFSANW | |
| | | | ALYDAELQLVELCRSAGVKLRLFHGRGGTVGRGGGPSYDAIL | |
| | | | AQPRGAVQGSVRITEQGEIISAKYGNPETARRNLEALVSATL | |
| | | | EASLLDVSELTDHQRAYDIMSEISELSLKKYASLVHEDQGFI | |
| | | | DYFTQSTPLQEIGSLNIGSRPSSRKQTSSVEDLRAIPWVLSW | |
| | | | SQSRVMLPGWFGVGTALEQWIGEGEQATQRIAELQTLNESWP | |
| | | | FFTSVLDNMAQVMSKAELRLAKLYADLIPDTEVAERVYSVIR | |
| | | | EEYFLTKKMFCVITGSDDLLDDNPLLARSVQRRYPYLLPLNV | |
| | | | IQVEMMRRYRKGDQSEQVSRNIQLTMNGLSTALRNSG | |
| ppc | Escherichia | P00864 | MNEQYSALRSNVSMLGKVLGETIKDALGEHILERVETIRKLS | 207 |
| | coli | | KSSRAGNDANRQELLTTLQNLSMDELLPVAPAFSQFLNLANT | |
| | | | AEQYHSISPKGEAASNPEVIARTLRKLK&QPELSEDTIKKAV | |
| | | | ESLSLELVLTAHPTEITRRTLIHKMVEVNACLKQLDNKDlAD | |
| | | | YEHNQLMRRLRQLIAQSWHTDEIRKLRPSPVDEAKWGFAVVE | |
| | | | NSLWQGVPNYLRELNEQLEENLGYKLPVEFVPVRFTSWMGGD | |
| | | | RDGNPNVTADITRHVLLLSRWKATDLFLKDIQVLVSELSMVE | |
| | | | ATPELLALVGEEGAAEPYRYLMKNLRSRLMATQAWLEARLKG | |
| | | | EELPKPEGLLTQNEELWEPLYACYQSLQACGMGIIANGDLLD | |
| | | | TLRRVKCFGVPLVRIDIRQESTRHTEALGELTRYLGIGDYES | |
| | | | WSEADKQAFLIRELNSKRPLLPRNWQPSAETREVLDTCQVIA | |
| | | | EAPOGSIAAYVISMAKTPSDVLAVHLLLKEAGIGFAMPVAPL | |
| | | | FETLDDLNNANDVMTQLLNIDWYRGLIQGKQMVMIGYSDSAK | |
| | | | DAGVMAASWAQYQAQDALIKTCEKAGIELTLFHGRGGSIGRG | |
| | | | GAPAHAALLSQPPGSLKGGLRVTEQGEMIRFKYGLPEITVSS | |
| | | | LSLYTGAILEANLLPPPEPKESWRRIMDELSVISCDVYRGYV | |
| | | | RENKDFVPYFRSATPEQELGKLPLGSRPAKRRPTGGVESLRA | |
| | | | IPWIFAWTQNRLMLPAWLGAGTALQKVVEDGKQSELEAMCRD | |
| | | | WPFFSTRLGMLEMVFAKADLWLAEYYDQRLVDKALWPLGKEL | |
| | | | RNLQEEDIKVVLAIANDSHLMADLPWIAESIQLRNIYTDPLN | |
| | | | VLQAELLHRSRQAEKEGQEPDPRVEQALMVTIAGIA | |
| | | | AGMRNTG | |
| pyc | Streptomyces | CAB59603 | MFRKVLVANRGEIAIRAFRAGYELGARTVAVFPHEDRNSLHR | 12 |
| | coelicolor | | LKADEAYEIGEQGHPVRAYLSVEEIVRAARRAGADAVYPGYG | |
| | | | FLSENPELARACEEAGITFVGPSARILELTGNKARAVAAARE | |
| | | | AGVPVLGSSAPSTDVDELVRAADDVGFPVFVKAVAGGGGRGM | |
| | | | RRVEEPAQLREAIEAASREAASAFGDSTVFLEKAVVEPRHIE | |
| | | | VQILADGEGDVIHLFERDCSVQRRHQKVIELAPAPNLDPALR | |
| | | | ERICADAVNFARQIGYRNAGTVEFLVDRDGNHVFIEMNPRIQ | |
| | | | VEHTVTEEVTDVDLVQSQLRIAAGQTLADLGLAQENITLRGA | |
| | | | ALQCRITTEDPANGFRPDTGQISAYRSPGGSGIRLDGGTTHA | |
| | | | GTEISAHFDSMLVKLSCRGRDFTTAVNRARPAVAEFRIRGVA | |
| | | | TNIPFLQAVLDDPDFQAGRVTTSFIEQRPHLLTARHSADRGT | |
| | | | KLLTYLADVTVNKPHGERPELVDPLTKLPTASAGEPPAGSRQ | |
| | | | LLAELGPEGFARRLRESSTIGVTDTTFRDAHQSLLATRVRTK | |
| | | | DMLAVAPVVARTLPQLLSLECWGGATYDVALRFLAEDPWERL | |
| | | | AALREAVPNLCLQMLLRGRNTVGYTPYPTEVTDAFVQEAAAT | |
| | | | GIDIFRIFDALNDVEQMRPAIEAVRQTGSAVAEVALCYTADL | |
| | | | SDPSERLYTLDYYLRLAEQIVNAGAHVLAVKDMAGLLRAPAA | |
| | | | ATLVSALRREFDLPVHLHTHDTTGGQLATYLAAIQAGADAVD | |
| | | | GAVASMAGTTSQPSLSAIVAATDHTERPTGLDLQAVGDLEPY | |
| | | | WESVRKVYAPFEAGLASPTGRVYHHEIPGGQLSNLRTQAVAL | |
| | | | GLGDRFEDIEAMYAAADRMLGRLVKVTPSSKVVGDLALHLVG | |
| | | | AGVSPADFEQDPDRFDIPDSVVGFLRGELGTPPGGWPEPFRS | |
| | | | KALRGRAEARPLAELSEDDRDGLGKDRRATLNRLLFPGPARE | |
| | | | FDTHRASYGDTSILDSKDFFYGLRPGKEYTVDLDPGVRLLIE | |
| | | | LQAVGDADERGMRTVMSSLNGQLRPIQVRDRSAATDVPVTEK | |
| | | | ADRANPGHVAAPFAGVVTLAVAEGDEVEAGATVATIEAMKME | |
| | | | ASITAPKSGTVTRLAINRIQQVEGGDLLVQLA | |
| pyc | Mycobacterium | AAG30411.1 | MISKVLVANRGEIAIRAFRAAYEMGIATVAVYPYEDRNSLHR | 13 |
| | smegmatis | | LKADESYQIGEVGHPVRAYLSVDEIIRVAKHSGADAVYPGYG | |
| | | | FLSENPDLAAKCAEAGITFVGPSAEVLQLTGNKAPAIAAARA | |
| | | | AGLPVLSSSEPSSSVDELMAAAADMEFPLFVKAVSGGGGRGM | |
| | | | RRVTDRESLAEAIEAASREAESAFGDASVYLEQAVLNPRHIE | |
| | | | VQILADGAGNVMHLFERDCSVQRRHQKVVELAPAPNLSDELR | |
| | | | QQICADAVAFARQIGYSCAGTVEFLLDERGHHVFIECNPRIQ | |
| | | | VEHTVTEEITDVDLVSSQLRIAAGETLADLGLSQDRLVVRGA | |
| | | | AMQCRITTEVPANGFRPDTGRITAYRSPGGAGIRLDGGTNLG | |
| | | | ARISAHFDSMLVKLTCRGRDFSAAASRARRALAEFRIRGVST | |
| | | | NIPFLQAVIDDPDFPAGRVTTSFIDDRPHLLTSRSPADRGTR | |
| | | | ILNYLADITVNKPHGERPSTVYPQDKLPPLDLQAPPPAGSKQ | |
| | | | RLVELGPEGFAGWLRESKAVGVTDTTFRDAHQSLLATRVRTT | |
| | | | GLLMVAPYVARSMPQLLSIECWGGATYDVALRFLKEDPWERL | |
| | | | AALRESVPNICLQMLLRGRNTVGYTPYPELVTSAFVEEAAAT | |
| | | | GIDIFRIFDALNNVESMRPAIDAVRETGSTIAEVAMCYTGDL | |
| | | | SDPAENLYTLDYYLKLAEQIVEAGAHVLAIKDMAGLLPAPAA | |
| | | | HTLVSALRSRFDLPVHVHTHDTPGGQLATYLAAWSAGADAVD | |
| | | | GASAPMAGTTSQPALSSIVAAAAHTQYDTGLDLRAVCDLEPY | |
| | | | WEAVRKVYAPFESGLPGPTGRVYTHEIPGGQLSNLRQQAIAL | |
| | | | GLGDRFEEIEANYAAADRVLGRLVKVTPSSKVVGDLALALVG | |
| | | | AGITAEEFAEDPAKYDIPDSVIGFLRGELGDPPGGWPEPLRT | |
| | | | KALQGRGPARPVEKLTADDEALLAQPGPKRQAALNRLLFPGP | |
| | | | TAEFEAHRETYGDTSSLSANQFFYGLRYGEEHRVQLERGVEL | |
| | | | LIGLEAISEADERGMRTVMCIINGQLRPVLVRDRSIASEVPA | |
| | | | AEKADRNNADHIAAPFAGVVTVGVAEGDSVDAGQTIATIEAM | |
| | | | KMEAAITAPKAGTVARVAVAATAQVEGGDLLVVVS | |
| pyc | Coryne- | CAA70739 | MSTHTSSTLPAFKKILVANRGEIAVRAFRAALETGAATVAIY | 208 |
| | bacterium | | PREDRGSFHRSFASEAVRIGTEGSPVKAYLDIDEIIGAAKKV | |
| | glutamicum | | KADAIYPGYGFLSENAQLARECAENGITFIGPTPEVLDLTGD | |
| | | | KSRAVTAAKKAGLPVLAESTPSKNIDEIVKSAEGQTYPIFVK | |
| | | | AVAGGGGRGMRFVASPDELRKLATEASREAEAAFGDGAVYVE | |
| | | | RAVINPQHIEVQILGDHTGEVVHLYERDCSLQRRHQKVVEIA | |
| | | | PAQHLDPELRDRICADAVKFCRSIGYQGAGTVEFLVDEKGNH | |
| | | | VFIEMNPRIQVEHTVTEEVTEVDLVKAQMRLAAGATLKELGL | |
| | | | TQDKIKTHGAALQCRITTEDPNNGFRPDTGTITAYRSPOGAG | |
| | | | VRLDGAAQLGGEITAHFDSMLVKMTCRGSDFETAVAPAQRAL | |
| | | | AEFTVSGVATNIGFLRALLREEDFTSKRIATGFIADHPHLLQ | |
| | | | APPADDEQGRILDYLADVTVNKPHGVRPKDVAAPIDKLPNIK | |
| | | | DLPLPRGSRDRLKQLGPAAFARDLREQDALAVTDTTFRDAHQ | |
| | | | SLLATRVRSFALKPAAEAVAKLTPELLSVEAWGGATYDVANR | |
| | | | FLFEDPWDRLDELREAMPNVNIQMLLRGRNTVGYTPYPDSVC | |
| | | | RAFVKEAASSGVDIFRIFDALNDVSQMRPAIDAVLETNTAVA | |
| | | | EVANAYSGDLSDPNEKLYTLDYYLKMAEEIVKSGAHILAIKD | |
| | | | MAGLLRPAAVTKLVTALRREFDLPVHVHTHDTAGGQLATYFA | |
| | | | AAQAGADAVDGASAPLSGTTSQPSLSAIVAAFAHTRRDTGLS | |
| | | | LEAVSDLEPYWEAVRGLYLPFESGTPGPTGRVYRHEIPGGQL | |
| | | | SNLRAQATALGLADRFELIEDNYAAVNEMLGRPTKVTPSSKV | |
| | | | VGDLALHLVGAGVDPADFAADPQKYDIPDSVIAFLRGELGNP | |
| | | | PGGWPEPLRTRALEGRSEGKAPLTEVPEEEQAHLDADDSKER | |
| | | | RNSLNRLLFPKPTEEFLEHRRRFGNTSALDDREFFYGLVEGR | |
| | | | ETLIRLPDVRTPLLVRLDAISEPDDKGMRNVVANVNGQIRPM | |
| | | | RVRDRSVESVTATAEKADSSNKGHVAAPFAGVVTVTVAEGDE | |
| | | | VKAGDAVAIIEAMKMEATITASVDGKIDRVVVPAATKVEGGD | |
| | | | LIVVVS | |
| dapA | Thermobifida | ZP_00058970 | MVGSTTPNAPFGQMLTANITPMLDNGEVDYDGVARLATYLVD | 14 |
| | fusca | | EQRNDGLIVNGTTGESATTSDEEKERILRTVIDAVGDRATIV | |
| | | | AGAGSNDTRHSIELARTAERAGADGLLLVTPYYNRPPQEGLL | |
| | | | RHFTAIADATGLPIMLYDIPGRTGTPIDSETLVRLAEHPRIV | |
| | | | ANKDAKDDLGASSWVMSRTDLAYYSGSDMLNLPLLSIGAAGF | |
| | | | VSVVGHVVGSELHDMIDAYRAGDVARALDIHRRLIPVYRGMF | |
| | | | RTQGVITTKAVLAMFGLPAGVVRAPLLDASPELKELLREDLA | |
| | | | MAGVKGPTGLASAHEDAASGREAERLTEGTA | |
| dapA | Mycobacterium | CAC30464 | MTTVGFDVPARLGTLLTANVTPFDADGSVDTAAATRLANRLV | 15 |
| | leprae (can be | | DAGCDGLVLSGTTGESPTTTDDEKLQLLRVVLEAVGDRARVI | |
| | used to clone | | AGAGSYDTAHSVRLVKACAGEGAHGLLVVTPYYSKPPQTGLF | |
| | M. smegmatis | | AHFTAVADATELPVLLYDTPGRSVVPIEPDTIRALASHPNIV | |
| | gene) | | GVKEAKADLYSGARIMADTGLAYYSGDDALNLPWLAVGAIGF | |
| | | | ISVISHLAAGQLRELLSAFGSGDITTARKINVAIGPLCSAMD | |
| | | | RLGGVTMSKAGLRLQGIDVGDPRLPQMPATAEQIDELAVDMR | |
| | | | AASVLR | |
| dapA | Mycobacterium | CAA15549 | MTTVGFDVAARLGTLLTAMVTPFSGDGSLDTATAARLANHLV | 16 |
| | tuberculosis | | DQGCDGLVVSGTTGESPTTTDGEKIELLRAVLEAVGDRARVI | |
| | (can be used to | | AGAGTYDTAHSIRLAKACAAEGAHGLLVVTPYYSKPPQRGLQ | |
| | clone M. | | AHFTAVADATELPMLLYDIPGRSAVPIEPDTIRALASHPNIV | |
| | smegmatis | | GVKDAKADLHSGAQIMADTGLAYYSGDDALNLPWLAMGATGF | |
| | gene) | | ISVIAHLAAGQLRELLSAFGSGDIATARKINIAVAPLCNAMS | |
| | | | RLGGVTLSKAGLRLQGIDVGDPRLPQVAATPEQIDALAADMR | |
| | | | AASVLR | |
| dapA | Streptomyces | CAA20295 | MAPTSTPQTPFGRVLTAMVTPFTADGALDLDGAQRLAAHLVD | 17 |
| | coelicolor | | AGNDGLIINGTTGESPTTSDAEKADLVRAVVEAVGDRAHVVA | |
| | | | GVGTNNTQHSIELARAAERVGAHGLLLVTPYYNKPPQEGLYL | |
| | | | HFTAIADAAGLPVMLYDIPGRSGVPINTETLVRLAEHPRIVA | |
| | | | NKDAKGDLGRASWAIARSGLAWYSGDDMLNLPLLAVGAVGFV | |
| | | | SVVGHVVTPELRAMVDAHVAGDVQKALEIHQKLLPVFTGMFR | |
| | | | TQGVMTTKGALALQGLPAGPLRAPMVGLTPEETEQLKIDLAA | |
| | | | GGVQL | |
| dapA | Erwinia | | MFTGSIVALVTPMDDKGAVDRASLKKLIDYHVASGTSAIVSV | 18 |
| | chrysanthemi | | GTTGESATLSHDEHGDVVMLTLELSDGRIPVIAGTGANSTAE | |
| | | | AISLTQRFNDTGVAGCLTVTPYYNKPTQNGLFLHFKAIAEHT | |
| | | | DLPQILYNVPSRTGCDMLPETVARLSEIKNIVAIKEATGNLS | |
| | | | RVSQIQELVHEDFILLSGDDASSLDFMQLGGDGVISVTANIA | |
| | | | AREMAALCELAAQGNFVEARRLNQRLMPLHQKLFVEPNPIPV | |
| | | | KWACKALGLMATDTLRLPMTPLTDAGRDVMEQAMKQAGLL | |
| dapA | Coryne- | C40626 | MSTGLTAKTGVEHFGTVGVAMVTPFTESGDIDIAAGREVAAY | 126 |
| | bacterium | | LVDKGLDSLVLAGTTGESPTTTAAEKLELLKAVREEVGDRAK | |
| | glutamicum | | LIAGVGTNNTRTSVELAEAAASAGADGLLVVTPYYSKPSQEG | |
| | | | LLAHFGAIAAATEVPICLYDIPGRSGIPIESDTMRRLSELPT | |
| | | | ILAVKDAKGDLVAATSLIKETGLAWYSGDDPLNLVWLALGGS | |
| | | | GFISVIGHAAPTALRELYTSFEEGDLVRAREINAKLSPLVAA | |
| | | | QGRLGGVSLAKAALRLQGINVGDPRLPIMAPNEQELEALRED | |
| | | | MKKAGVL | |
| dapA | Escherichia | NP_416973 | MFTGSIVAIVTPMDEKGNVCRASLKKLIDYHVASGTSAIVSV | 127 |
| | coli | | GTTGESATLNHDEHADVVMMTLDLADGR | |
| | | | IPVIAGTGANATAEAISLTQRFNDSGIVGCLTVTPYYNRPSQ | |
| | | | EGLYQHFKAIAEHTDLPQILYNVPSRTGCDLLPETVGRLAKV | |
| | | | KNIIGIKEATGNLTRVNQIKELVSDDFVLLSGDDASALDFMQ | |
| | | | LGGHGVISVTANVAARDMAQMCKLAAEGHFAEARVINQRLMP | |
| | | | LHNKLFVEPNPIPVKWACKELGLVATDTLRLPMTPITDSGRE | |
| | | | TVRAALKHAGLL | |
| hom | Streptomyces | CAC33918 | MRTRPLKVALLGCGVVGSKVARIMTTHAADLAARIGAPVELA | 19 |
| | coelicolor | | GVAVRRPDKVREGIDPALVTTDATALVKRGDIDVVVEVIGGI | |
| | | | EPARTLITTAFAHGASVVSANKALIAQDGAALHAAADEHGKD | |
| | | | LYYEAAVAGAIPLIRPLRESLAGDKVNRVLGIVNGTTNFILD | |
| | | | AMDSTGAGYQEALDEATALGYAEADPTADVEGFDAAAKAAIL | |
| | | | AGIAFHTRVRLDDVYREGMTEVTAADFASAKEMGCTIKLLAI | |
| | | | CERAADGGSVTARVHPAMIPLSHPLANVREAYNAVFVESDAA | |
| | | | GQLMFYGPGAGGSPTASAVLGDLVAVCRNRLGGATGPGESAY | |
| | | | AALPVSPMGDVVTRYHISLDVADKPGVLAQVATVFAEHGVSI | |
| | | | DTVRQSGKDGEASLVVVTHRASDAALGGTVEALRKLDTVRGV | |
| | | | ASIMRVEGE | |
| hom | Mycobacterium | AAD32592 | MSKKPIGVAVLGLGNVGSEVVRIIADSADDLAARIGAPLELR | 20 |
| | smegmatis | | GVGVRRVADDRGVPTELLTDDIDALVSRDDVDIVVEVMGPVE | |
| | | | PARKAILSALEQGKSVVTANKALMAMSTGELAQAAEKAHVDL | |
| | | | YFEAAVAGAIPVIRPLTQSLAGDTVRRVAGIVNGTTNYILSE | |
| | | | MDSTGADYTSALADASALGYAEADPTADVEGYDAAAKAAILA | |
| | | | SIAFHTRVTADDVYREGITTVSAEDFASAPALGCTIKLLAIC | |
| | | | ERLTSDEGKDRVSARVYPALVPLTHPLAAVNGAFNAVVVEAE | |
| | | | AAGRLMFYGQGAGGAPTAFAVMGDVVMAARNRVQGGRGPRES | |
| | | | KYAKLPIAPIGFIPTRYYVISIMNVADRPGVLSAVAAEF | |
| hom | Thermobifida | ZP_00058460 | MRRPEPAGAADRGRTRPRHRRTGGHHPLRGRHGQGRGGDPHL | 21 |
| | fusca | | CQCRRRYERQHPHPAVRCGVHLCAGLAAQRRRADAVPPGRQA | |
| | | | LRERRHRRARPLPPCRPASRRPGSSGRHRRLLLLHGQQLQPR | |
| | | | APACRGRGPREERPRPGATG~RRRPVAAGRRLSSGRRRSGHH | |
| | | | DEVLDTDNERRNGSHPLMALKVALLGCGVVGSQVVRLLNEQS | |
| | | | RELAERIGTPLEIGGIAVRRLDRARGTGVDPDLLTTDANGLV | |
| | | | TRDDIDLVVEVIGGIEPARSLILAAIQKGKSVVTANKALLAE | |
| | | | DGATTHAAAREAGVDVYYEASVAGAIPLLRPLRDSLAGDRVN | |
| | | | RVLGIVNGTTNYILDRMDSLGAGFTESLEEAQALGYAEADPT | |
| | | | ADVEGFDAAAKAAILARLAFHTPVTAADVHREGITEVSAADI | |
| | | | ASAKAMGCVVKLLAICQRSDDGSSIGVRVHPVMLPREHPLAS | |
| | | | VKGAYNAVFVEAESAGQLMFYGAGAGGVPTASAVLGDLVAVA | |
| | | | RNRLARTFVADGRADAKLPVHPMGETITSYHVALDVADRPGV | |
| | | | LAGVAKVFAANGVSIKHVRQEGRGDDAQLVLVSHTAPDAALA | |
| | | | RTVEQLRNHEDVRAVASVMRVETFDNER | |
| hom | Coryne- | CAA68614 | MTSASAPSFNPGKGPGSAVGIALLGFGTVGTEVMRLMTEYGD | 209 |
| | bacterium | | ELAHRIGGPLEVRGIAVSDISKPREGVAPELLTEDAFALIER | |
| | glutamicum | | EDVDIVVEVIGGIEYPREVVLAALKAGKSVVTANKALVAAHS | |
| | | | AELADAAEAANVDLYFEAAVAGAIPVVGPLRRSLAGDQIQSV | |
| | | | MGIVNGTTNFILDAMDSTGADYADSLAEATRLGYAEADPTAD | |
| | | | VEGHDAASKAAILASIAFHTRVTADDVYCEGISNISAADIEA | |
| | | | AQQAGHTIKLLAICEKFTNKEGKSAISARVHPTLLPVSHPLA | |
| | | | SVNKSFNAIFVEAEAAGRLMFYGNGAGGAPTASAVLGDVVGA | |
| | | | ARNKVHGGRAPGESTYANLPIADFGETTTRYHLDMDVEDRVG | |
| | | | VLAELASLFSEQGISLRTIRQEERDDDARLIVVTHSALESDL | |
| | | | SRTVELLKAKPVVKAINSVIRLERD | |
| metL | Escherichia | CAA23585 | SVIAQAGAKGRQLHKFGGSSLADVKCYLRVAGIMAEYSQPDD | 210 |
| (bifunctional; | coli | | MMVVSAAGSTTNRLISWLKLSQTDRLSAHQVQQTLRRYQCDL | |
| contains | | | ISGLLPAEEADSLISAFVSDLERLAALLDSGINDAVYAEVVG | |
| hom | | | HGEVWSARLMSAVLNQQGLPAAWLDAREFLRAERAAQPQVDE | |
| activity) | | | GLSYPLLQQLLVQHPGKRLVVTGFISRNNAGETVLLGRNGSD | |
| | | | YSATQIGALAGVSRVTIWSDVAGVYSADPRKVKDACLLPLLR | |
| | | | LDEASELARLAAPVLHARTLQPVSGSEIDLQLRCSYTPDQGS | |
| | | | TRIERVLASGTGARIVTSHDDVCLIEFQVPASQDFKLGHKEI | |
| | | | DQILKRAQVRPLAVGVHNDRQLLQFCYTSEVADSALKILDEA | |
| | | | GLPGELRLRQGLALVAMVGAGVTRNPLHCHRFWQQLKGQPVE | |
| | | | FTWQSDDGISLVAVLRTGPTESLIQGLHQSVFPAEKRIGLVL | |
| | | | FGKGNIGSRWLELFAREQSTLSARTGFEFVLAGVVDSRRSLL | |
| | | | SYDGLDASRALAFFNDEAVEQDEESLFLWMRAHPYDDLVVLD | |
| | | | VTASQQLADQYLDFASHGFHVISANKLAGASDSNKYRQIHDA | |
| | | | FEKTGRHWLYNATVGAGLPINHTVRDLIDSGDTILSISGIFS | |
| | | | GTLSWLFLQFDGSVPFTELVDQAWQQGLTEPDPRDDLSGKDV | |
| | | | SRKLVILAREAGYNIEPDQVRVESLVPAHCEGGSIDHFFENG | |
| | | | DELNEQMVQRLEAAREMGLVLRYVARFDANGKARVGVEAVRE | |
| | | | DHPLRSLLPCDNVFAIESRWYRDNPLVIRGPGAGRDVTAGAI | |
| | | | QSDINRLAQLL | |
| thrA | Escherichia | AAA97301 | MRVLKFGGTSVANAERFLRVADILESNARQGQVATVLSAPAK | 211 |
| (bifunctional; | coli | | ITNHLVAMIEKTISGQDALPNISDAERIFAELLTGLAAAQPG | |
| contain | | | FPLAQLKTFVDQEFAQIKHVLHGISLLGQCPDSINAALICRG | |
| hom | | | EKMSIATMAGVLEARGHNVTVIDPVEKLLAVGHYLESTVDIA | |
| activity | | | ESTRRIAASRIPADHMVLMAGFTAGNEKGELVVLGRNGSDYS | |
| | | | AAVLAACLRADCCETWTDVDGVYTCDPRQVPDARLLKSMSYQ | |
| | | | EAMELSYFGAKVLHPRTITPIAQFQIPCLIKNTGNPQAPGTL | |
| | | | IGASRDEDELPVKGISNLNNMAMFSVSGPGMKGMVGMAARVF | |
| | | | AANSRARISVVLITQSSSEYSISFCVPQSDCVRAERANQEEF | |
| | | | YLELKEGLLEPLAVTERLAIISVVGDGMRTLRGISAKFFAAL | |
| | | | ARANINIVAIAQGSSERSISVVVNNDDATTGVRVTHQMLFNT | |
| | | | DOVIEVFVIGVGGVGGALLEQLKRQQSWLKNKNIDLRVCGVA | |
| | | | NSKALLTNVHGLNLENWQEELAQAKEPFNLGRLIRLVKEYHL | |
| | | | LNPVIVDCTSSQAVADQYADFLREGFHVVTPNKKANTSSMDY | |
| | | | YHQLRYAAEKSRRKFLYDTNVGAGLPVIENLQNLLNAGDELM | |
| | | | KFSGILSGSLSYIFGKLDEGMSFSEATTLAREMGYTEPDPRD | |
| | | | DLSGMDVARKLLILARETGRELELADIEIEPVLPAEFNAEGD | |
| | | | VAAFMANLSQLDDLFAARVAKARDEGKVLRYVGNIDEDGVCR | |
| | | | VKIAEVDGNDPLFKVKNGENALAFYSHYYQPLPLVLRGYGAG | |
| | | | NDVTAAGVFADLLRTLSWKLGV | |
| metA | Mycobacterium | CAA17113 | MTISDVPTQTLPAEGEIGLIDVGSLQLESGAVIDDVCIAVQR | 22 |
| | tuberculosis | | WGKLSPARDNVVVVLHALTGDSHITGPAGPGHPTPGWWDGVA | |
| | (can be used to | | GPGAPIDTTRWCAVATNVLGGCRGSTGPSSLARDGKPWGSRF | |
| | clone M. | | PLISIRDQVQADVAALAALGITEVAAVVGGSMGGARALEWVV | |
| | smegmatis | | GYPDRVRAGLLLAVGARATADQIGTQTTQIAAIKADPDWQSG | |
| | gene) | | DYHETGPAPDAGLRLARRFAHLTYRGEIELDTRFANHNQGNE | |
| | | | DPTAGGRYAVQSYLEHQGDKLLSRFDAGSYVILTEALNSHDV | |
| | | | GRGRGGVSAALRACPVPVVVGGITSDRLYPLRLQQELADLLP | |
| | | | GCAGLRVVESVYGHDGFLVETEAVGELIRQTLGLAD | |
| | | | REGACRR | |
| metA | Mycobacterium | CAB10992 | MTISKVPTQKLPAEGEVGLVDIGSLTTESGAVIDDVCIAVQR | 23 |
| | leprae (can be | | WGELSPTRDNVVMVLHALTGDSHITGPAGPGHPTPGWWDWIA | |
| | used to clone | | GPGAPIDTNRWCAIATNVLGGCRGSTGPSSLARDGKPWGSRF | |
| | M. smegmatis | | PLISIRDQVEADIAALAANGITKVAAVVGGSMGGARALEWII | |
| | gene) | | GHPDQVPAGLLLAVGVRATADQIGTQTTQIAAIKTDPNWQGG | |
| | | | DYYETGRAPENGLTIARRFAHLTYRSEVELDTRFANNNQGNE | |
| | | | DPATGGRYAVQSYLEHQGDKLLARFDAGSYVVLTETLNSHDV | |
| | | | GRGRGGIGTALRGCPVPVVVGGITSDRLYPLRLQQELAEMLP | |
| | | | GCTGLQVVDSTYGHDGFLVESEAVGKLIRQTLELADVGSKED | |
| | | | ACSQ | |
| metA | Thermobifida | ZP_00058188 | MSHDTTPPLPATGAWREGDPPGDRRWVELSEPLPLETGGELP | 24 |
| | fusca | | GVRLAYETWGSLNEDRSNAVLVLHALTGDSHVVGPEGPGHPS | |
| | | | PGWWEGIIGPGLALDTDRYFVVAPNVLGGCQGSTGPSSTAPD | |
| | | | GRPWGSRFPRITIRDTVPAEFALLREFGIHSWAAVLGGSMGG | |
| | | | MRALEWAATYPERVRRLLLLASPAASSAQQIAWAAPQLHAIR | |
| | | | SDPYWHGGDYYDRPGPGPVTGMGIARRIAHITYRGATEFDER | |
| | | | FGRNPQDGEDPMAGGRFAVESYLDHHAVKLARRFDAGSYVVL | |
| | | | TQAMNTHDVGRGRGGVAQALRRVTARTMVAGVSSDFLYPLAQ | |
| | | | QQELADGIPGADEVRVIESASGHDGFLTEINQVSVLI | |
| | | | KELLAQ | |
| metA | Corynebacterium | AAC06035 | MPTLAPSGQLEIQAIGDVSTEAGAIITNAEIAYHRWGEYRVD | 212 |
| | glutamicum | | KEGRSNVLIEHALTGDSNAADWWAADLLGPGKAINTDIYCVI | |
| | | | CTNVIGGCNGSTGPGSMHPDGNFWGWRFPATSIRDQVNAEKQ | |
| | | | FLDALGITTVAAVVLLGGSMGGARTLEWAAMYPETVGAAAVL | |
| | | | AVSARASAWQIGIQSAQIKAIENDHHWHEGNYYESGCNPATG | |
| | | | LGAARRIAHLTYRGELEIDERFGTKAQKNENPLGPYRKPDQR | |
| | | | FAVESYLDYQADKLVQRFDAGSYVLLTDALNRHDIGRDRGGL | |
| | | | NKALESIKVPVLVAGVDTDILYPYHQQEHLSRNLGNLLAMAK | |
| | | | IVSPVGHDAFLTESRQMDRIVRNFFSLISPDEDNPSTYIEFY | |
| | | | I | |
| metA | Escherichia | NP_418437 | MPIRVPDELPAVNFLREENVFVMTTSRASGQEIRPLKVLILN | 213 |
| | coli | | LMPKKIETENQFLRLLSNSPLQVDIQLLRIDSRESRNTPAEH | |
| | | | LNNFYCNFEDIQDQNFDGLIVTGAPLGLVEFNDVAYWPQIKQ | |
| | | | VLEWSKDHVTSTLFVCWAVQAALNILYGIPKQTRTEKLSGVY | |
| | | | EHHILHPHALLTRGFDDSFLAFHSRYADFPAALIRDYTDLEI | |
| | | | LAETEEGDAYLFASKDKRIAFVTGHPEYDAQTLAQEFFRDVE | |
| | | | AGLDPDVPYNYFPHNDPQNTPRASWRSHGNLLFTNWLNYYVY | |
| | | | QITPYDLRHMNPTLD | |
| metA | T. fusca | n/a | MSHDTTPPLPATGAWREGDPPGDRRWVELSEPLPLETGGELP | 281 |
| F269A | | | GVRLAYETWGSLNEDRSNAVLVLHALTGDSHVVGPEGPGHPS | |
| | | | PGWWEGIIGPGLALDTDRYFVVAPNVLGGCQGSTGPSSTAPD | |
| | | | GRPWGSRFPRITIRDTVRAEFALLREFGIHSWAAVLGGSMGG | |
| | | | MRALEWAATYPERVRRLLLLASPAASSAQQIAWAAPQLHAIR | |
| | | | SDPYWHGGDYYDRPGPGPVTGMGIARRIAHITYRGATEFDER | |
| | | | FGRNPQDGEDPMAGGRAAVESYLDHHAVKLARRFDAGSYVVL | |
| | | | TQAMNTHDVGRGRGGVAQALRRVTARTMVAGVSSDFLYPLAQ | |
| | | | QQELADGIPGADEVRVIESASGHDGFLTEINQVSVLIKELLA | |
| | | | Q | |
| metY | T. fusca | n/a | MALRPDRSIMTAEDTTPESTAADKWSFETKQIHAGAAPDPAT | 282 |
| F379A | | | NARATPIYQTTSYVFRDTQHGADLFSLAEPGNIYTRIMNPTQ | |
| | | | DVLEKRVAALEGGVAAVAFASGSAAITAAVLNLAGAGDHIVS | |
| | | | SPSLYGGTYNLFRYTLPKLGIEVTFIKDQDDLDEWPAAARDN | |
| | | | TKLFFAETLPNPANNVLDVRAVADVAHEVGVPLMVDNTVPTP | |
| | | | YLQRPIDHGADIVVHSATKFLGGHGTTIAGIVVDAGTFDFGA | |
| | | | HGDRFPGFVEPDPSYHGLKYWEALGPGAYAAKLRVQLLRDTG | |
| | | | AAISPFNSFLILQGIETLSLRMERHVANAQALAEWLESRDEV | |
| | | | AKVYYPGLPSSPYYEAAKKYLPKGAGAIVSFELHGGIEAGHA | |
| | | | AVDGTELFSQLVNIGDVRSLIVHPASTTHSQLTPEEQLASGV | |
| | | | TPGLVRLSVGLEHVDDLRADLEAGLRAAKAYQ | |
| metY | C. glutamicum | N/a | MPKYDNSNADQWGFETRSIHAGQSVDAQTSARNLPIYQSTAF | 283 |
| G232A | | | VFDSAEHAKQRFALEDLGPVYSRLTNPTVEALENRIASLEGG | |
| | | | VHAVAFSSGQAATTNAILNLAGAGDHIVTSPRLYGGTETLFL | |
| | | | ITLNRLGIDVSFVENPDDPESWQAAVQPNTKAFFGETFANPQ | |
| | | | ADVLDIPAVAEVAHRNSVPLIIDNTIATAALVRPLELGADVV | |
| | | | VASLTKFYTGNGSGLGGVLIDAGKFDWTVEKDGKPVFPYFVT | |
| | | | PDAAYHGLKYADLGAPAFGLKVRVGLLRDTGSTLSAFNAWAA | |
| | | | VQGIDTLSLRLERHNENAIKVAEFLNNHEKVEKVNFAGLKDS | |
| | | | PWYATKEKLGLKYTGSVLTFEIKGGKDEAWAFIDALKLHSNL | |
| | | | ANIGDVRSLVVHPATTTHSQSDEAGLARAGVTQSTVRLSVGI | |
| | | | ETIDDIIADLEGGFAAI | |
| metY | T. fusca | n/a | MALRPDRSIMTAEDTTPESTAADKWSFETKQIHAGAAPDPAT | 284 |
| G240A | | | NARATPIYQTTSYVFRDTQHGADLFSLAEPGNIYTRIMNPTQ | |
| | | | DVLEKRVAALEGGVAAVAFASGSAAITAAVLNLAGAGDHIVS | |
| | | | SPSLYGGTYNLFRYTLPKLGIEVTFIKDQDDLDEWHAAARDN | |
| | | | TKLFFAETLPNPANNVLDVRAVADVAHEVGVPLMVDNTVPTP | |
| | | | YLQRPIDHGADIVVHSATKFLGGHGTTIAAIVVDAGTFDFGA | |
| | | | HGDRFPGFVEPDPSYHGLKYWEALGPGAYAAKLRVQLLRDTG | |
| | | | AAISPFNSFLILQGIETLSLRNERHVANAQALAEWLESRDEV | |
| | | | AKVYYPGLPSSPYYEAAKKYLPKGAGAIVSFELHGGIEAGRA | |
| | | | FVDGTELFSQLVNIGDVRSLIVHPASTTHSQLTPEEQLASGV | |
| | | | TPGLVRLSVGLEHVDDLRADLEAGLRAAKAYQ | |
| metA | T. fusca | n/a | MSHDTTPPLPATGAWREGDPPGDRRWVELSEPLPLETGGELP | 285 |
| G81A | | | GVRLAYETWGSLNEDRSNAVLVLHALTGDSHVVGPEGPAHPS | |
| | | | PGWWEGIIGPGLALDTDRYFVVAPNVLGGCQGSTGPSSTAPD | |
| | | | GRPWGSRFPRITIRDTVRAEFALLREFGIHSWAAVLGGSMGG | |
| | | | MRALEWAATYPERVRRLLLLASPAASSAQQIAWAAPQLHAIR | |
| | | | SDPYWHGGDYYDRPGPGPVTGMGIARRIAHITYRGATEFDER | |
| | | | FGRNPODGEDPMAGGRFAVESYLDHHAVKLARRFDAGSYVVL | |
| | | | TQAMNTHDVGRGRGGVAQALRRVTARTMVAGVSSDFLYPLAQ | |
| | | | QQELADGIPGADEVRVIESASGHDGFLTEINQVSVLIKELLA | |
| | | | Q | |
| metA | C. glutamicum | n/a | MPTLAPSGQLEIQAIGDVSTEAGAIITNAEIAYHRWGEYRVD | 286 |
| K233A | | | KEGRSNVVLIEHALTGDSNAADWWADLLGPGKAINTDIYCVI | |
| | | | CTNVIGGCNGSTGPGSMHPDGNFWGNRFPATSIRDQVNAEKQ | |
| | | | FLDALGITTVAAVLGGSMGGARTLEWAANYPETVGAAAVLAV | |
| | | | SARASAWQIGIQSAQIKAIENDHHWHEGNYYESGCNPATGLG | |
| | | | AARRIAHLTYRGELEIDERFGTAAQKNENPLGPYRKPDQRFA | |
| | | | VESYLDYQADKLVQRFDAGSYVLLTDALNRHDIGRDRGGLNK | |
| | | | ALESIKVPVLVAGVDTDILYPYHQQEHLSRNLGNLLAMAKIV | |
| | | | SPVGHDAFLTESRQMDRIVRNFFSLISPDEDNPSTYIEFYI | |
| metY | Thermobifide | ZP_00058187 | MALRPDRSIMTAEDTTPESTAADKWSFETKQIHAGAAPDPAT | 25 |
| | fusca | | NARATPIYQTTSYVFRDTQHGADLFSLAEPGNIYTRIMNPTQ | |
| | | | DVLEKRVAALEGGVAAVAFASGSAAITAAVLNLAGAGDHIVS | |
| | | | SPSLYGGTYNLFRYTLPKLGIEVTFIKDQDDLDEWRAAARDN | |
| | | | TKLFFAETLPNPANNVLDVPAVADVAHEVGVPLMVDNTVPTP | |
| | | | YLQRPIDHGADIVVHSATKFLGGHGTTIAGIVVDAGTFDFGA | |
| | | | HGDRFPGFVEPDPSYHGLKYWEALGPGAYAAKLRVQLLRDTG | |
| | | | AAISPFNSFLILQGIETLSLRMERHVANAQALAEWLESRDEV | |
| | | | AKVYYPGLPSSPYYEAAKKYLPKGAGAIVSFELHGGIEAGRA | |
| | | | FVDGTELFSQLVNIGDVRSLIVHPASTTHSQLTPEEQLASGV | |
| | | | TPGLVRLSVGLEHVDDLRADLEAGLRAAKAYQ | |
| metY | Mycobacterium | CAA17112 | MSADSNSTDADPTAHWSFETKQIHAGQHPDPTTNARALPIYA | 26 |
| | tuberculosis | | TTSYTFDDTAHAAALFGLEIPGNIYTRIGNPTTDVVEQRIAA | |
| | | | LEGGVAALFLSSGQAAETFAILNLAGAGDHIVSSPRLYGGTY | |
| | | | NLFHYSLAKLGIEVSFVDDPDDLDTWQAAVRPNTKAFFAETI | |
| | | | SNPQIDLLDTPAVSEVAHRNGVPLIVDNTIATPYLIQPLAQG | |
| | | | ADIVVHSATKYLGGHGAAIAGVIVDGGNFDWTQGRFPGFTTP | |
| | | | DPSYHGVVFAELGPPAFALKARVQLLRDYGSAASPFNAFLVA | |
| | | | QGLETLSLRIERHVANAQRVAEFLAARDDVLSVNYAGLPSSP | |
| | | | WHERAKRLAPKGTGAVLSFELAGGIEAGKAFVNALKLHSHVA | |
| | | | NIGDVRSLVIHPASTTHAQLSPAEQLATGVSPGLVRLAVGIE | |
| | | | GIDDILADLELGFAAARRFSADPQSVAAF | |
| metY | M. smegmatis | | MVDGFLRRPQGKRGSAGSGPRETGKPDGGQPCVVVREPFTPT | 287 |
| | | | RGVHLYVRTRVRLALGAGRPAAFTPHSPPSSRRRPSMTTPDP | |
| | | | TENWSFETKQIHAGQSPDSATHARALPIYQTTSYTFDDTSHA | |
| | | | AALFGLEVPGNIYTRIGNPTTDVVEQRIAALEGGVAALFLSS | |
| | | | GQAAETFAILNIAKAGDHIVSSPRLYGGTYNLLHYTLPKLGI | |
| | | | ETTFVENPDDLESWRAAVRPNTKAFFAETISNPQIDILDIPN | |
| | | | VAAIAHEAGVPLIVDNTIATPYLIQPIAHGADIVVHSATKYL | |
| | | | GGHGSAIAGVIVDGGTFDWTNGKFPGFTEPDPSYHGVVFAEL | |
| | | | GAPAYALKARVQLLRDLGSAAAPFNAFLIAQGLETLSLRVER | |
| | | | HVANAQKVAHFLENHPDVSSVNYAGLPSSPWYELGRKLAPKG | |
| | | | TGAVLAFELSGGLEAGKAFVNALTLHSHVANIGDVRSLVIHP | |
| | | | ASTTHQQLSPEEQLSTGVTPGLVRLAVGLEGIDDIIADLEQG | |
| | | | FAAARPFSGAAQTAQTV | |
| metY | Corynebacterium | AAG49653 | MPKYDNSNADQWGFETRSIHAGOSVDAQTSARNLPIYQSTAF | 214 |
| | glutamicum | | VFDSAEHAKQRFALEDLGPVYSRLTNPTVEALENRIASLEGG | |
| | | | VHAVAFSSGQAATTNAILNLAGAGDHIVTSPRLYGGTETLFL | |
| | | | ITLNRLGIDVSFVENPDDPESWQAAVQPNTKAFFGETFANPQ | |
| | | | ADVLDIPAVAEVAHRNSVPLIIDNTIATAALVRPLELGADVV | |
| | | | VASLTKFYTGNGSGLGGVLIDGGKFDWTVEKDGKPVFPYFVT | |
| | | | PDAAYHGLKYADLGAPAFGLKVRVGLLRDTGSTLSAFNAWAA | |
| | | | VQGIDTLSLRLERHNENAIKVAEFLNNHEKVEKVNFAGLKDS | |
| | | | PWYATKEKLGLKYTGSVLTFEIKGGKDEAWAFIDALKLHSNL | |
| | | | ANIGDVRSLVVHPATTTHSQSDEAGLARAGVTQSTVRLSVGI | |
| | | | ETIDDIIADLEGGFAAI | |
| MetY | C. glutamicum | N/a | MPKYDNSNADQWGFETRSIHAGQSVDAQTSARNLPIYQSTAF | 288 |
| D231A | | | VFDSAEHAKQRFALEDLGPVYSRLTNPTVEALENRIASLEGG | |
| | | | VHAVAFSSGQAATTNAILNLAGAGDHIVTSPRLYGGTETLFL | |
| | | | ITLNRLGIDVSFVENPDDPESWQAAVQPNTKAFFGETFANPQ | |
| | | | ADVLDIPAVAEVAHRNSVPLIIDNTIATAALVRPLELGADVV | |
| | | | VASLTKFYTGNGSGLGGVLIAGGKFDWTVEKDGKPVFPYFVT | |
| | | | PDAAYHGLKYADLGAPAFGLKVRVGLLRDTGSTLSAFNAWAA | |
| | | | VQGIDTLSLRLERHNENAIKVAEFLNNHEKVEKVNFAGLKDS | |
| | | | PWYATKEKLGLKYTGSVLTFEIKGGKDEAWAFIDALKLHSNL | |
| | | | ANIGDVRSLVVHPATTTHSQSDEAGLARAGVTQSTVRLSVGI | |
| | | | ETIDDIIADLEGGFAAI | |
| metY | T. fusca | n/a | MALRPDRSIMTAEDTTPESTAADKWSFETKQIHAGAAPDPAT | 289 |
| D244A | | | NARATPIYQTTSYVFRDTQHGADLFSLAEPGNIYTRINNPTQ | |
| | | | DVLEKRVAALEGGVAAVAFASGSAAITAAVLNLAGAGDHIVS | |
| | | | SPSLYGGTYNLFRYTLPKLGIEVTFIKDQDDLDEWRAAARDN | |
| | | | TKLFFAETLPNPANNVLDVRAVADVAHEVGVPLMVDNTVPTP | |
| | | | YLQRPIDHGADIVVHSATKFLGGHGTTIAGIVVAAGTFDFGA | |
| | | | HGDRFPGFVEPDPSYHGLKYWEALGPGAYAAKLRVQLLRDTG | |
| | | | AAISPFNSFLILQGIETLSLRMERHVANAQALAEWLESRDEV | |
| | | | AKVYYPGLPSSPYYEAAKKYLPKGAGAIVSFELEGGIEAGRA | |
| | | | FVDGTELFSQLVNIGDVRSLIVHPASTTHSQLTPEEQLASGV | |
| | | | TPGLVRLSVGLEHVDDLRADLEAGLRAAKAYQ | |
| MetA | T. fusca | n/a | MSHDTTPPLPATGAWREGDPPGDRRWVELSEPLPLETGGELP | 290 |
| D287A | | | GVRLAYETWGSLNEDRSNAVLVLHALTGDSHVVGPEGPGHPS | |
| | | | PGWWEGIIGPGLALDTDRYFVVAPNVLGGCQGSTGPSSTAPD | |
| | | | GRPWGSRFPRITIRDTVRAEFALLREFGIHSWAAVLGGSMGG | |
| | | | MRALEWAATYPERVRRLLLLASPAASSAQQIAWAAPQLHAIR | |
| | | | SDPYWHGGDYYDRPGPGPVTGMGIARRIAHITYRGATEFDER | |
| | | | FGRNPQDGEDPMAGGRFAVESYLDHHAVKLARRFAAGSYVVL | |
| | | | TQANNTHDVGRGRGGVAQALRRVTARTMVAGVSSDFLYPLAQ | |
| | | | QQELADGIPGADEVRVIESASGHDGFLTEINQVSVLIKELLA | |
| | | | Q | |
| metY | T. fusca | n/a | MALRPDRSIMTAEDTTPESTAADKWSFETKQIHAGAAPDPAT | 291 |
| D394A | | NARATPIYQTTSYVFRDTQHGADLFSLAEPGNIYTRIMNPTQ | | |
| | | | DVLEKRVAALEGGVAAVAFASGSAAITAAVLNLAGAGDHIVS | |
| | | | SPSLYGGTYNLFRYTLPKLGIEVTFIKDQDDLDEWRAAARDN | |
| | | | TKLFFAETLPNPANNVLDVRAVADVAHEVGVPLMVDNTVPTP | |
| | | | YLQRPIDHGADIVVHSATKFLGGHGTTIAGIVVDAGTFDFGA | |
| | | | HGDRFPGFVEPDPSYHGLKYWEALGPGAYAAKLRVQLLRDTG | |
| | | | AAISPFNSFLILQGIETLSLRMERHVANAQALAEWLESRDEV | |
| | | | AKVYYPGLPSSPYYEAAKKYLPKGAGAIVSFELHGGIEAGRA | |
| | | | FVDGTELFSQLVNIGAVRSLIVHPASTTHSQLTPEEQLASGV | |
| | | | TPGLVRLSVGLEHVDDLRADLEAGLRAAKAYQ | |
| metK | Mycobacterium | CAB02194 | MSEKGRLFTSESVTEGHPDKICDAISDSVLDALLAADPRSRV | 27 |
| | tuberculosis | | AVETLVTTGQVHVVGEVTTSAKEAFADITNTVRARILEIGYD | |
| | (can be used to | | SSDKGFDGATCGVNIGIGAQSPDIAQGVDTAHEARVEGAADP | |
| | clone M. | | LDSQGAGDQGLMFGYAINATPELMPLPIALAHRLSRRLTEVR | |
| | smegmatis | | KNGVLPYLRPDGKTQVTIAYEDNVPVRLDTVVISTQHAADID | |
| | gene) | | LEKTLDPDIREKVLMTVLDDLAHETLDASTVRVLVNPTGKFV | |
| | | | LGGPMGDAGLTGRKIIVDTYGGWARHGGGAFSGKDPSKVDRS | |
| | | | AAYAMRWVAKNVVAAGLAERVEVQVAYAIGKAAPVGLFVETF | |
| | | | GTETEDPVKIEKAIGEVFDLRPGAIIRDLNLLRPIYAPTAAY | |
| | | | GHFGRTDVELPWEQLDKVDDLKRAI | |
| metK | Mycobacterium | CAC30052 | MSEKGRLFTSESVTEGHPDKICDAISDSILDALLAEDPCSRV | 28 |
| | leprae (can be | | AVETLVTTGQVHVVGEVTTLAKTAFADISNTVRERILDIGYD | |
| | used to clone | | SSDKGFDGASCGVNIGIGAQSSDIAQGVNTAHEVRVEGAADP | |
| | M. smegmatis | | LDAQGAGDQGLMFGYAINDTPELMPLPIALAHRLARRLTEVR | |
| | gene) | | KNGVLPYLRSDGKTQVTIAYEDNVPVRLDTVVISTQHAAGVD | |
| | | | LDATLAPDIREKVLNTVIDDLSHDTLDVSSVRVLVNPTGKFV | |
| | | | LGGPMGDAGLTGRKIIVDTYGGWARHGGGAFSGKDPSKVDRS | |
| | | | AAYAMRWVAKNIVAAGLAERIEVQVAYAIGKAAPVGLFVETF | |
| | | | GTEAVDPAKIEKAIGEVFDLRPGAIIRDLHLLRPIYAQTAAY | |
| | | | GHFGRTDVELPWEQLNKVDDLKRAI | |
| metK | Thermobifida | ZP_00057715 | MSRRLFTSESVTEGHPDKIADQISDAILDSMLRDDPHSRVAV | 29 |
| | fusca | | ETLITTGLVHVAGEVTTSTYVDIPTIIREKILEIGYDSSAKG | |
| | | | FDGASCGVSVSIGGQSPDIAQGVDNAYEAREEEIFDDLDRQG | |
| | | | AGDQGLMFGYAPELMPLPITLAHALSQRLAEVRRDGTIPYLR | |
| | | | PDGKTQVTVEYDGNRNNETPVRLDTVVVSSQHAPDIDLRELL | |
| | | | TPDIKEHVVDPVVARYNLEADNYRLLVNPTGRFEIGGPMGDA | |
| | | | GLTGRKIIVDTYGGYARHGGGAFSGKDPSKVDRSAAYATRWV | |
| | | | AKNIVAAGLADRVEVQVAYAIGKAHPVGVFLETFGTEKVAPE | |
| | | | QLEKAVLEVFDLRPAAIIRDLDLLRPIYSQTSVYGHFGRELP | |
| | | | DFTWERTDRVDALKAAVGA | |
| metK | Streptomyces | CAB76898 | MSRRLFTSESVTEGHPDKIADQISDTILDALLREDPTSRVAV | 30 |
| | coelicolor | | ETLITTGLVHVAGEVTTKAYADIANLVRGKILEIGYDSSKKG | |
| | | | FDGASCGVSVSIGAQSPDIAQGVDTAYENRVEGDEDELDRQG | |
| | | | AGDQGLMFGYASDETPTLMPLPVFLAHRLSKRLSEVRKNGTI | |
| | | | PYLRPDGKTQVTIEYDGDKAVRLDTVVVSSQHASDIDLESLL | |
| | | | APDIKEFVVEPELKALLEDGIKIDTENYRLLVNPTGRFEIGG | |
| | | | PMGDAGLTGRKIIIDTYGGMARHGGGAFSGKDPSKVDRSAAY | |
| | | | ANRWVAKNVVAAGLAARCEVQVAYAIGKAEPVGLFVETFGTA | |
| | | | KVDTEKIEKAIDEVFDLRPAAIIRALDLLRPIYAQTAAYGHF | |
| | | | GRELPDFTWERTDRVDALREAAGL | |
| metK | Coryne- | BAB98996 | MAQPTAVRLFTSESVTEGHPDKICDAISDTILDALLEKDPQS | 215 |
| | bacterium | | RVAVETVVTTGIVHVVGEVRTSAYVEIPQLVRNKLIEIGFNS | |
| | glutamicum | | SEVGFDGRTCGVSVSIGEQSQEIADGVDNSDEARTNGDVEED | |
| | | | DRAGAGDQGLMFGYATNETEEYMPLPIALAHRLSRRLTQVRK | |
| | | | EGIVPHLRPDGKTQVTFAYDAQDRPSHLDTVVISTQHDPEVD | |
| | | | RAWLETQLREHVIDWVIKDAGIEDLATGEITVLINPSGSFIL | |
| | | | GGPMGDAGLTGRKIIVDTYGGMARHGGGAFSGKDPSKVDRSA | |
| | | | AYAMRWVAKNIVAAGLADRAEVQVAYAIGRAKPVGLYVETFD | |
| | | | TNKEGLSDEQIQAAVLEVFDLRPAAIIRELDLLRPIYADTAA | |
| | | | YGHFGRTDLDLPWEAIDRVDELPAALKLA | |
| metK | Escherichia | AAA69109 | MAKNLFTSESVSEGHPDKIADQISDAVLDAILEQDPKARVAC | 216 |
| | coli | | ETYVKTGMVLVGGEITTSAWVDIEEITRNTVREIGYVHSDMG | |
| | | | FDANSCAVLSAIGKQSPDINQGVDRADPLEQGAGDQGLMFGY | |
| | | | ATNETDVLMPAPITYAHRLVQRQAEVRKNGTLPWLRPDAKSQ | |
| | | | VTFQYDDGKIVGIDAVVLSTQHSEEIDQKSLQEAVMEEIIKP | |
| | | | ILPAEWLTSATKFFINPTGRFVIGGPMGDCGLTGRKIIVDTY | |
| | | | GGMARHGGGAFSGKDPSKVDRSAAYAARYVAKNIVAAGLADR | |
| | | | CEIQVSYAIGVAEPTSIMVETFGTEKVPSEQLTLLVREFFDL | |
| | | | RPYGLIQMLDLLHPIYKETAAYGHFGREHFPWEKTDKAQLLR | |
| | | | DAAGLK | |
| metC | Mycobacterium | CAA16256 | MQDSIFNLLTEEQLRGRNTLKWNYFGPDVVPLWLAEMDFPTA | 59 |
| | tuberculosis | | PAVLDGVPACVDNEEFGYPPLGEDSLPRATADWCRQRYGWCP | |
| | this to clone | | RPDWVRVVPDVLKGMEVVVEFLTRPESPVALPVPAYMPFFDV | |
| | M. smegmatis | | LHVTGRQRVEVPMVQQDSGRYLLDLDALQAAFVRGAGSVIIC | |
| | gene) | | NPNNPLGTAFTEAELPAIVDIAARHGARVIADEIWAPVVYGS | |
| | | | RHVAAASVSEAAAEVVVTLVSASKGWNLPGLMCAQVILSNRR | |
| | | | DAHDWDRINMLHRMGASTVGIRAMIAAYHHGESWLDELLPYL | |
| | | | RANRDHLARALPELAPGVEVNAPDGTYLSWVDFRALALPSEP | |
| | | | AEYLLSKAKVALSPGIPFGAAVGSGFARLNFATTRAILDRAI | |
| | | | EAIAAALRDIID | |
| metC | Bifidobacterium | P_00121229 | MSMNNIPQSTTVSNATADVSCFDANHIDVTTIEDLKQVGSDK | 60 |
| | longum | | WTRYPGCIGAFIAEMDYGLAPCVAEAIEEATERGALGYIPDP | |
| | | | WKKEVARSCAAWQRRYGWDVDPTCIRPVPDVLEAFEVFLREI | |
| | | | VRAGNSIVVPTPAYMPFLSVPRLYGVEVLEIPMLCAGASESS | |
| | | | GRNDEWLFDFDAIEQAFANGCHAFVLCNPHNPIGKVLTREEM | |
| | | | LRLSDLAAKYNVRIFSDEIHAPFVYQGHTHVPFASINRQTAM | |
| | | | QAFTSTSASKSFNIPGTKCAQVILTNPDDLELWMRNAEWSEH | |
| | | | QTATIGAIATTAAYDGGAAWFEGVMAYIERNIALVNEQMRTR | |
| | | | FAKVRYVEPQGTYIAWLDFSPLGIGDPANYFFKKANVALTDG | |
| | | | RECGEVGRGCVRMNFAMPYPLLEECFDRMAAALEADGLL | |
| metC | Lactobacillus | CAD65601 | MQYDFNKVINRRGTYSTQWDYIQDRFGRSDILPFSISDTDFP | 61 |
| | plantarum | | VPVGVQEALEQRIKHPIYGYTRWNNEDYKNSIINWFSSQNQV | |
| | | | TINPDWILYSPSVVFSIATFIRMKSAVGESVAVFTPMYDAFY | |
| | | | HVIEDNQRVLAPVRLGSAQQDYSIDWDTLKAVLKQTATKILL | |
| | | | LTNPHNPTGKVFSDDELKHIVALCQQyNVFIISDDIHKDIVY | |
| | | | QKAAYTPVTEFTTKNVVLCCSATKTFNTPGLIGAYLFEPEAE | |
| | | | LREMFLCELKQKNALSSASILGIESQMAAYNTGSDYLVQLIT | |
| | | | YLQNNFDYLSTFLKSQLPEIRFKQPEATYLAWMDVSQLGLTA | |
| | | | EKLQDKLVNTGRVGIMSGTTYGDSHYLRMNIACPISKLQEGL | |
| | | | KRMEYGIRS | |
| metC | Coryne- | AAK69425 | MRFPELEELKNRRTLKWTRFPEDVLPLWVAESDFGTCPQLKE | 217 |
| | bacterium | | AMADAVEREVFGYPPDATGLNDALTGFYERRYGFGPNPESVF | |
| | glutamicum | | AIPDVVRGLKLAIEHFTKPGSAIIVPLPAYPPFIELPKVTGR | |
| | | | QAIYIDAHEYDLKEIEKAFADGAGSLLFCNPHNPLGTVFSEE | |
| | | | YIRELTDIAAKYDARIIVDEIHAPLVYEGTHVVAAGVSENAA | |
| | | | NTCITITATSKAWNTAGLKCAQIFFSNEADVKAWKNLSDITR | |
| | | | DGVSILGLIAAETVYNEGEEFLDESIQILKDNRDFAAAELEK | |
| | | | LGVKVYAPDSTYLMWLDFAGTKIEEAPSKILREEGKVMLNDG | |
| | | | AAFGGFTTCARLNFACSRETLEEGLRRIASVL | |
| metC | Escherichia | P06721 | MADKKLDTQLVNAGRSKKYTLGAVNSVIQRASSLVFDSVEAK | 218 |
| | coli | | KHATRNRANGELFYGRRGTLTHFSLQQANCELEGGAGCVLFP | |
| | | | CGAAAVANSILAFIEQGDHVLMTNTAYEPSQDFCSKILSKLG | |
| | | | VTTSWFDPLIGADIVKHLQPNTKIVFLESPGSITMEVHDVPA | |
| | | | IVAAVRSVVPDAIIMIDNTWAAGVLFKALDFGIDVSIQAATK | |
| | | | YLVGHSDAMIGTAVCNARCWEQLRENAYLMGQMVDADTAYIT | |
| | | | SRGLRTLGVRLRQHHESSLKVAEWLAEHPQVARVNHPALPGS | |
| | | | KGHEFWKRDFTGSSGLFSFVLKKKLNNEELANYLDNFSLFSM | |
| | | | AYSWGGYESLILANQPEHIAAIRPQGEIDFSGTLIRLHIGLE | |
| | | | DVDDLIADLDAGFARIV | |
| pck | C. glutamicum | | MTTAAIRGLQGEAPTKNKELLNWIADAVELFQPEAVVFVDGS | 292 |
| | | | QAEWDRMAEDLVEAGTLIKLNEEKRPNSYLARSNPSDVARVE | |
| | | | SRTFICSEKEEDAGPTNNWAPPQAMKDEMSKHYAGSMKGRTM | |
| | | | YVVPFCMGPISDPDPKLGVQLTDSEYVVMSMRIMTRMGIEAL | |
| | | | DKIGANGSFVRCLHSVGAPLEPGQEDVAWPCNDTKYITQFPE | |
| | | | TKEIWSYGSGYGGNAILAKKCYALRIASVMAREEGWMAEHML | |
| | | | ILKLINPEGKAYHIAAAFPSACGKTNLAMITPTIPGWTAQVV | |
| | | | GDDIAWLKLREDGLYAVNPENGFFGVAPGTNYASNPIANKTM | |
| | | | EPGNTLFTNVALTDDGDIWWEGMDGDAPAHLIDWMGNDWTPE | |
| | | | SDENAAHPNSRYCVAIDQSPAAAPEFNDWEGVKIDAILFGGR | |
| | | | RADTVPLVTQTYDWEHGTMVGALLASGQTAASAEAKVGTLRH | |
| | | | DPMAMLPFIGYNAGEYLQNWIDMGNKGGDKMPSIFLVNWFRR | |
| | | | GEDGRFLWPGFGDNSRVLKWVIDRIEGHVGADETVVGHTAKA | |
| | | | EDLDLDGLDTPIEDVKEALTAPAEQWANDVEDNAEYLTFLGP | |
| | | | RVPAEVHSQFDALKARISAAHA | |
| pck | E. coli | | MRVNNGLTPQELEAYGISDVHDIVYNPSYDLLYQEELDPSLT | 293 |
| | | | GYERGVLTNLGAVAVDTGIFTGRSPKDKYIVRDDTTRDTFWW | |
| | | | ADKGKGKNDNKPLSPETWQHLKGLVTRQLSGKRLFVVDAFCG | |
| | | | ANPDTRLSVRFITEVAWQAHFVKNMFIRPSDEELAGFKPDFI | |
| | | | VMNGAKCTNPQWKEQGLNSENFVAFNLTERMQLIGGTWYGGE | |
| | | | MKKGMFSMMNYLLPLKGIASMHCSANVGEKGDVAVFFGLSGT | |
| | | | GKTTLSTDPKRRLIGDDEHGWDDDGVFNFEGGCYAKTIKLSK | |
| | | | EAEPEIYNAIRRDALLENVTVREDGTIDFDDGSKTENTRVSY | |
| | | | PIYHIDNIVKPVSKAGHATKVIFLTADAFGVLPPVSRLTADQ | |
| | | | TQYHFLSGFTAKLAGTERGITEPTPTFSACFGAAFLSLHPTQ | |
| | | | YAEVLVKRMQAAGAQAYLVNTGWNGTGKRISIKDTPAIIDAI | |
| | | | LNGSLDNAETFTLPMFNLAIPTELPGVDTKILDPRNTYASPE | |
| | | | QWQEKAETLAKLFIDNFDKYTDTPAGAALVAAGPKL | |
| gdh | Strepto- | CAB82051 | MPAVPERAPVTTRSETQSTLDHLLTEIELRNPAQPEFHQAAH | 62 |
| | mycescoelicolor | | EVLETLAPVVAARPEYAEPGLIERLVEPERQVMFRVPWQDDQ | |
| | | | GRVRVNRGFRVEFNSALGPYKGGLRFHPSVNLGVIKFLGFEQ | |
| | | | IFKNALTGLGIGGGKGGSDFDPHGRSDAEVMRFCQSFMTELY | |
| | | | RHIGEHTDVPAGDIGVGGREIGYLFGQYRRITNRWESGVLTG | |
| | | | KGQGWGGSLIRPEATGYGNVLFAAAMLRERGEDLEGQTAVVS | |
| | | | GSGNVAIYTIEKLTALGANAVTCSDSSGYVVDEKGIDLDLLK | |
| | | | QIKEVERGRVDAYAERRGASARFVPGGSVWDVPADLALPSAT | |
| | | | QNELDENAAATLVRNGVKAVSEGAMMPTTPEAVHLLQKAGVA | |
| | | | FGPGKAANAGGVAVSALEMAQNHARTSWTAARVEEELADIMT | |
| | | | SIHTTCHETAERYDAPGDYVTGANIAGFERVADAMLAQGVI | |
| gdh | Thermobifida | ZP_00057948 | MRPEPEATMSANLDEKLSPIYEEILRRNPGEVEFHQAVREVL | 63 |
| | fusca | | ECLGPVVAKNPDISHAKTIERLCEPERQLIFRVPWMDDSGEI | |
| | | | HVNRGFRVEFSSSLGPYKGGLRFHPSVNLSIIKFLGFEQIFK | |
| | | | NSLTGLPIGGAKGGSDFDPKGRSDAEIMRFCQSFMTELYRHL | |
| | | | GEHTDVPAGDIGVGQREIGYLFGQYKRITNRYESGVFTGKGL | |
| | | | SWGGSQVRREATGYGCVLFTAEMLRARGDSLEGKRVSVSGSG | |
| | | | NVAIYAIEKAQQLGAHVVTCSDSNGYVVDEKGIDLELLKQVK | |
| | | | EVERGRVSDYAKRRGSHVRYIDSSSSSVWEVPCDIALPCATQ | |
| | | | NELTGRDAITLVRNGVGAVAEGANMPTTPEGIRVFAEAGVAF | |
| | | | APGKAANAGGVATSALEMQQNASRDSWSFEYTEKRLAEIMRH | |
| | | | IHDTCYETAERYGRPGDYVAGANIAAFEIVAEANLAQGLI | |
| gdh | Lactobacilus | CAD63684 | MSQATDYVQHVYQVIEHRDPNQTEFLEAINDVFKTITPVLEQ | 64 |
| | plantarum | | HPEYIEANILERLTEPERIIQFRVPWLDDAGHARVNRGFRVQ | |
| | | | FNSAIGPYKGGLRLHPSVNLSIVKFLGFEQIFKNALTGLPIG | |
| | | | GGKGGSDFDPKGKSDNEIMRFCQSFMTELSKYIGLDTDVPAG | |
| | | | DIGVGGREIGFLYGQYKRLRGADRGVLTGKGLNYGGSLARTE | |
| | | | ATGYGLAYYTNEMLKANQLSFPGQRVAISGAGNVAIYAIQKV | |
| | | | EELGGKVITCSDSNGYVIDENGIDFKIVKQIKEVERGRIKDY | |
| | | | ADRVASASYYEGSVWDAQVAYDIALPCATQNEISGDQAKNLI | |
| | | | ANGAKVVAEGANMPSSPEAIATYQAASLLYGPAKAANAGGVA | |
| | | | VSALEMSQNSMRLSWTFEEVDNRLKQIMQDIFAHSVAAADEY | |
| | | | HVSGDYLSGANIAGFTKVADAMLAQGLV | |
| gdh | Coryne- | CAA42048 | MTVDEQVSNYYDMLLKRNAGEPEFHQAVAEVLESLKLVLEKD | 219 |
| | bacterium | | PHYADYGLIQRLCEPERQLIFRVPWVDDQGQVHVNRGFRVQF | |
| | glutamicum | | NSALGPYKGGLRFHPSVNLGIVKFLGFEQIFKNSLTGLPIGG | |
| | | | GKGGSDFDPKGKSDLEIMRFCQSFMTELHRHIGEYRDVPAGD | |
| | | | IGVGGREIGYLFGHYRRMANQHESGVLTGKGLTWGGSLVRTE | |
| | | | ATGYGCVYFVSEMIKAKGESISGQKIIVSGSGNVATYAIEKA | |
| | | | QELGATVIGFSDSSGWVHTPNGVDVAKLREIKEVRRARVSVY | |
| | | | ADEVEGATYHTDGSIWDLKCDIALPCATQNELNGENAKTLAD | |
| | | | NGCRFVAEGANMPSTPEAVEVFRERDIRFGPGKATPEAVEVF | |
| | | | RERDIRFGPGKAVNVGGVATSALEMQQNASRETCAETAAEYG | |
| | | | HENDYVVGANIAGFKKVADAMLAQGVI | |
| gdh | Escherichia | BAA15550 | MDQTYSLESFLNHVQKRDPNQTEFAQAVREVMTTLWPFLEQN | 220 |
| | coli | | PKYRQMSLLERLVEPERVIQFRVVWVDDRNQIQVNRAWRVQF | |
| | | | SSAIGPYKGGMRFHPSVNLSILKFLGFEQTFKNALTTLPMGG | |
| | | | GKGGSDFDPKGKSEGEVMRFCQALMTELYRHLGADTDVPAGD | |
| | | | IGVGGREVGFMAGMMKKLSNNTACVFTGKGLSFGGSLIRPEA | |
| | | | TGYGLVYFTEAMLKRHGMGFEGMRVSVSGSGNVAQYAIEKAN | |
| | | | EFGARVITASDSSGTVVDESGFTKEKLARLIEIKASRDGRVA | |
| | | | DYAKEFGLVYLEGQQPWSLPVDIALPCATQNELDVDAAHQLI | |
| | | | ANGVKAVAEGANMPTTIEATELFQQAGVLFAPGKAANAGGVA | |
| | | | TSGLEMAQNAARLGWKAEKVDARLHHIMLDIHHACVEHGGEG | |
| | | | EQTNYVQGANIAGFVKVADANLAQGVI | |
| ddh | Bacillus | BAB07799 | MSAIRVGIVGYGNLGRGVEFAISQNPDMELVAVFTRRDPSTV | 65 |
| | sphaericus | | SVASNASVYLVDDAEKFQDDIDVMILCGGSATDLPEQGPHFA | |
| | | | QWFNTIDSFDTHAKIPEFFDAVDAAAQKSGKVSVISVGWDPG | |
| | | | LFSLNRVLGEAVLPVGTTYTFWGDGLSQGHSDAVRRIEGVKN | |
| | | | AVQYTLPIKDAVERVRNGENPELTTREKHARECWVVLEEGAD | |
| | | | APKVEQEIVTMPNYFDEYNTTVNFISEDEFNANHTGMPHGGF | |
| | | | VIRSGESGANDKQILEFSLKLESNPNFTSSVLVAYARAAHRL | |
| | | | SQAGEKGAKTVFDIPFGLLSPKSAAQLRKELL | |
| dtsR1 | Thermobifida | ZP_00058587 | MATQAPEPLPADQIDIRTTAGKLADLQRRRYEAVHAGSEPAV | 66 |
| | fusca | | AKQHAKGKMTARERIDALLDPGSFVEFDAFARHRSTNFGLEK | |
| | | | NRPYGDGVVTGYGTIDGRPVAVFSQDVTVFGGSLGEVYGEKI | |
| | | | VKVLDHALKTGCPVIGINEGGGARIQEGVVALGLYAEIFKRN | |
| | | | THASGVIPQISLVMGAAAGGHVYSPALTDFIVMVDQTSQMFI | |
| | | | TGPDVIKTVTGEDVTMEELGGARTHNTKSGVAHYMASDEHDA | |
| | | | LEYVKALLSYLPSNNLDEPPVEPVQVTLEVTEEDRELDTFIP | |
| | | | DSANQPYDMRRVIEHIVDDGEFLEVHELFAQNIIVGFGRVEG | |
| | | | HPVGVVANQPMNLAGCLDIDASEKAARFVRTCDAFNIPVLTL | |
| | | | VDVPGFLPGTDQEFGGIIRRGAKLLYAYAEATVPLVTIITRK | |
| | | | AFGGAYDVMGSKHLGADINLAWPTAQIAVMGAQGAVNILHRR | |
| | | | TLAAADDVEATRAQLIAEYEDTLLNPYSAAERGYVDSVIMPS | |
| | | | ETRTSVIKALRALRGKRKQLPPKKHGNIPL | |
| dtsR1 | Streptomyces | ADD28194 | SEPEEQQPDIHTTAGKLADLRRRIEEATHAGSAPAVEKQHAK | 67 |
| | coelicolor | | GKLTARERIDLLLDEGSFVELDEFARIRSTNFGLDANRPYGG | |
| | | | VVTGYGTVDGRPVAVFSQDFTVFGGALGEVYGQKIVKVMDFA | |
| | | | LKTGCPVVGINDSGGARIQEGVASLGAYGEIFRRNTHASGIP | |
| | | | QISLVVGPCAGGAVYSPAITDFTVMVDQTSHMFITGPDVIKT | |
| | | | VTGEDVGFEELGGARTHNSTSGVAHHMAGDEKDAVEYVKQLL | |
| | | | SYLPSNNLSEPPAFPEEADLAVTDEDAELDTIVPDSANQPYD | |
| | | | MHSVIEHVLDDAEFFETQPLFAPNILTGFGRVEGRPVGIANQ | |
| | | | PMQFAGCLDITASEKARFVRTCDAFNVPVLTFVDVPGFLPGV | |
| | | | DQEHDGIIRRGAKLIFAYAEATVPLITVITRKAFGGADVMGS | |
| | | | KHLGADLNLAWPTAQIAVMGAQGAVNILHRRTIADADDAEAT | |
| | | | RARLIQEYEDALLNPYTAAERGYVDAVIMPSDTRRIVRGLRQ | |
| | | | LRTKRESLPPKKHGNIPL | |
| dtsR1 | Mycobacterium | CAB07063 | MTSVTDRSAHSAERSTEHTIDIHTTAGKLAELHKRREESLHP | 68 |
| | tuberculosis | | VGEDAVEKVHAKGKLTARERIYALLDEDSFVELDALAKHRST | |
| | (use this to clone | | NFNLGEKRPLGDGVVTGYGTIDGRDVCIFSQDATVFGGSLGE | |
| | M. smegmatis | | VYGEKIVKVQELAIKTGRPLIGINDGAGARIQEGVVSLGLYS | |
| | gene) | | RIFRNNILASGVIPQISLIMGAAAGGHVYSPALTDFVIMVDQ | |
| | | | TSQMFITGPDVIKTVTGEEVTMEELGGAHTHMAKSGTAHYAA | |
| | | | SGEQDAFDYVRELLSYLPPNNSTDAPRYQAAAPTGPIEENLT | |
| | | | DEDLELDTLIPDSPNQPYDMHEVITRLLDDEFLEIQAGYAQN | |
| | | | IVVGFGRIDGRPVGIVANQPTHFAGCLDINASEKAARFVRTC | |
| | | | DCFNIPIVMLVDVPGFLPGTDQEYNGIIRRGAKLLYAYGEAT | |
| | | | VPKITVITRKAYGGAYCVMGSKDMGCDVNLAWPTAQIAVMGA | |
| | | | SGAVGFVYRQQLAEAAANGEDIDKLRLRLQQEYEDTLVIPYV | |
| | | | AAERGYVDAVIPPSHTRGYIGTALRLLERKIAQLPPKKHGNV | |
| | | | PL | |
| dtsR1 | Mycobacterium | AAA85917 | MTSVTDHSAHSMERAAEHTINIHTTAGKLAELHKRTEEALHP | 69 |
| | leprae (use this | | VGAAAFEKVHAKGKFTARERIYALLDDDSFVELDALARHRST | |
| | to clone M. | | NFGLGERPVGDGVVTGYGTIDGRDVCIFSQDVTVFGGSLGEV | |
| | smegmatis | | YGEKIVKVQELAIKTGRPLIGINDGAGARIQEGVVSLGLYSR | |
| | gene) | | IFRNNILASGVIPQISLIMGAAAGGHVYSPALTDFVVMVDQT | |
| | | | SQMFITGPDVIKTVTGEDVTMEELGGAHTHMAKSGTAHYVAS | |
| | | | GEQDAFDWVRDVLSYLPSNNFTDAPRYSKPVPHGSIEDNLTA | |
| | | | KDLELDTLIPDSPNQPYDMHEVVTRLLDEEEFLEVQAGYATN | |
| | | | IVVGLGRIDDRPVGIVANQPIQFAGCLDINASEKAARFVRVC | |
| | | | DCFNIPIVMLVDVPGFLPGTEQEYDGIIRRGAKLLFAYGEAT | |
| | | | VPKITVITRKAYGGAYCVMGSKNMGCDVNLAWPTAQIAVMGA | |
| | | | SGAVGFVYRKELAQAAKNGANVDELRLQLQQEYEDTLVNPYI | |
| | | | AAERGYVDAVIPPSHTRGYIATALHLLERKIAHLPPKKHGNI | |
| | | | PL | |
| dtsR1 | Coryne- | NP_599940 | MTISSPLIDVANLPDINTTAGKIADLKARRAEANFPMGEKAV | 221 |
| | bacterium | | EKVHAAGRLTARERLDYLLDEGSFIETDQLARHRTTAFGLGA | |
| | glutamicum | | KRPATDGIVTGWGTIDGREVCIFSQDGTVFGGALGEVYGEKM | |
| | | | IKIMELAIDTGRPLIGLYEGAGARIQDGAVSLDFISQTFYQN | |
| | | | IQASGVIPQISVIMGACAGGNAYGPALTDFVVMVDKTSKMFV | |
| | | | TGPDVIKTVTGEEITQEELGGATTHMVTAGNSHYTAATDEEA | |
| | | | LDWVQDLVSFLPSNNRSYAPMEDFDEEEGGVEENITADDLKL | |
| | | | DEIIPDSATVPYDVRDVIECLTDDGEYLEIQADRAENVVIAF | |
| | | | GRIEGQSVGFVANQPTQFAGCLDIDSSEKAARFVRTCDAFNI | |
| | | | PIVMLVDVPGFLPGAGQEYGGILRRGAKLLYAYGEATVPKIT | |
| | | | VTMRKAYGGAYCVMGSKGLGSDINLAWPTAQIAVMGAAGAVG | |
| | | | FIYRKELMAADAKGLDTVALAKSFEREYEDHMLNPYHAAERG | |
| | | | LIDAVILPSETRGQISRNLRLLKHKNVTRPARKHGNNPL | |
| metH | Thermobifida | ZP_00059561 | MSARLSFREVLGSRVLVADGAMGTMLQTYDLSMDDFEGHEGC | 70 |
| | fusca | | NEVLNITRPDVVREIHEAYLQAGVDCVETNTFGANFGNLGEY | |
| | | | GIAERTYELAEAGARLAREAADAYTTADHVRYVLGSVGPGTK | |
| | | | LPTLGHAPYAVLRDHYEQCARGLIDGGVDAIVIETCQDLLQA | |
| | | | KAAIVGARPARKAAGTDTPIIVQVTIETTGTMLVGSEIGAAL | |
| | | | TSLEPLGVDMIGLNCATGPAEMSEHLRYLSHHSRIPLSCMPN | |
| | | | AGLPELGADGAVYPLQPHELTEAHDTFIREFGLALVGGCCGT | |
| | | | TPEHLAQVVERVQGRGVPDRKPHVEPAAASIYQSVPFRQDTS | |
| | | | YLAIGERTNANGSKAFREANLAERYDDCVEIARQQIRDGAHM | |
| | | | LDLCVDYVGRDGVRDMRELASRLATASTLPLVLDSTEVAVLE | |
| | | | AGLEMLGGRAVLNSVNYEDGDGPDSRFAKVAALAVEHGAALM | |
| | | | ALTIDEQGQARTAERKVEVAERLIRQLTTEYGIRKHDIIVDC | |
| | | | LTFTIATGQEESRRDALETIEAIRELKRRHPDVQTTLGVSNV | |
| | | | SFGLNPAARIVLNSVFLHECVQAGLDSAIVHASKILPINRIP | |
| | | | EEQRQVALDMIYDRRTDDYDPLQRFLQLFEGVDAQAMRASRE | |
| | | | EELAALPLWERLERRIVDGEAAGMEADLDEALTQRSALDIIN | |
| | | | TTLLAGMKTVGDLFGSGQMQLPFVLKSAEVMKAAVAYLEPHM | |
| | | | EKVDGDLGKGRIVLATVKGDVHDIGKNLVDIILSNNGYEVIN | |
| | | | LGIKQPISAILEAAERHRADVIGMSGLLVKSTVVMRENLEEM | |
| | | | NARGVADRYPVLLGGAALTRSYVEQDLAEIFKGEVRYARDAF | |
| | | | EGLKLMDAIMAVKRGVKGAKLPPLRTRRVKRGAQLTVTEPEK | |
| | | | MPTRSDVATDNPVPTPPFWGDRICKGIPLADYAAFLDERATF | |
| | | | MGQWGLRGSRGDGPTYEELVETEGRPRLRMWLDRIQTEGWLE | |
| | | | PAVVYGYYRCYSEGNDLVVLGEDENELTRFTFPRQRRDRNLC | |
| | | | LADFFRPKESGELDTVAFQVVTVGSTISKATAELFEKNAYRD | |
| | | | YLELHGLSVQLTEALAEYWHTRVRAELGFAGEDPDPADLDAY | |
| | | | FKLGYRGARFSLGYGACPNLEDRAKIVALLRPERVGVTLSEE | |
| | | | FQLVPEQSTDAIVVHHPEAKYFNV | |
| metH | Streptomyces | CAC18788 | MASSPSTPPADTRTRVSALREALATRVVVADGAMGTMLQAQN | 71 |
| | coelicolor | | PTLDDFQQLEGCNEVLNLTRPDIVRSVHEEYFAAGVDCVETN | |
| | | | TFGANHSALGEYDIPERVHELSEAGARVAREVADEFGARDGR | |
| | | | QRWVLGSMGPGTKLPTLGHAPYTVLRDAYQRNAEGLVAGGAD | |
| | | | ALLVETTQDLLQTKASVLGARRALDVLGLDLPLIVSVTVETT | |
| | | | GTMLLGSEIGAALTALEPLGIDMIGLNCATGPAEMSEHLRYL | |
| | | | ARHSRIPLTCMPNAGLPVLGKDGAHYPLTAPELADAHETFVR | |
| | | | EYGLSLVGGCCGTTPEHLRQVVERVRDTAPTARDPRPEPGAA | |
| | | | SLYQTVPFRQDTSYLAIGERTNANGSKKFREAMLDGRWDDCV | |
| | | | EMARDQIREGAHMLDLCVDYVGRDGVADMEELAGRFATASTL | |
| | | | PIVLDSTEVDVIRAGLEKLGGRAVINSVNYEDGAGPESRFAR | |
| | | | VTKLAREHGAALIALTIDEVGQARTAEKKVEIAERLIDDLTG | |
| | | | NWGIHESDILVDCLTFTICTGQEESRKDGLATIEGIRELKRR | |
| | | | HPDVQTTLGLSNISFGLNPAARILLNSVFLDECVKAGLDSAI | |
| | | | VHASKILPIARFDEEQVTTALDLIYDRRREGYDPLQKLMQLF | |
| | | | EGATAKSLKASKAEELAALPLEERLKRRIIDGEKNGLEQDLD | |
| | | | EALRERPALEIVNDTLLDGMKVVGELFGSGQMQLPFVLQSAE | |
| | | | VMKTAVAHLEPHMEKTDDDGKGTIVLATVRGDVHDIGKNLVD | |
| | | | IILSNNGYNVVNLGIKQPVSAILEAADEHRADVIGMSGLLVK | |
| | | | STVIMKENLEELNQRKLAADYPVILGGAALTRAYVEQDLHEI | |
| | | | YDGEVRYARDAFEGLRLMDALIGIKRGVPGAKLPELKQRRVR | |
| | | | AATVEIDERPEEGHVRSDVATDNPVPTPPFRGTRVVKGIQLK | |
| | | | EYASWLDEGALFKGQWGLKQARTGEGPSYEELVESEGRPRLR | |
| | | | GLLDRLQTDNLLEAAVVYGYFPCVSKDDDLIVLDDDG~ERTR | |
| | | | FTFPRQRRGRRLCLADFFRPEESGETDVVGFQVVTVGSRIGE | |
| | | | ETARMFEANAYRDYLELHGLSVQLAEALAEYWHARVRSELGF | |
| | | | AGEDPAEMEDMFALKYRGARFSLGYGACPDLEDPAKIAALLE | |
| | | | PERIGVHLSEEFQLHPEQSTDAIVIHHPEAKYFNAR | |
| metH | Mycobacterium | CAB10719 | MTAADKHLYDTDLLDVLSQRVMVGDGANGTQLQAADLTLDDF | 72 |
| | tuberculosis (use | | RGLEGCNEILNETRPDVLETIHRNYFEAGADAVETNTFGCNL | |
| | this to clone M. | | SNLGDYDIADRIRDLSQKGTAIARRVADELGSPDRKRYVLGS | |
| | smegmatis | | MGPGTKLPTLGHTEYAVIRDAYTEAALGMLDGGADAILVETC | |
| | gene) | | QDLLQLKAAVLGSRRANTRAGRHIPVFAHVTVETTGTMLLGS | |
| | | | EIGAALTAVEPLGVDMIGLNCATGPAEMSEHLRHLSRHARIP | |
| | | | VSVMPNAGLPVLGAKGAEYPLLPDELAEALAGFIAEFGLSLV | |
| | | | GGCCGTTPAHIREVAAAVANIKRPERQVSYEPSVSSLYTAIP | |
| | | | FAQDASVLVIGERTNANGSKGFREAMIAEDYQKCLDIAKDQT | |
| | | | RDGAHLLDLCVDYVGRDGVADMKALASRLATSSTLPIMLDST | |
| | | | ETAVLQAGLEHLGGRCAINSVNYEDGDGPESRFAKTMALVAE | |
| | | | HGAAVVALTIDEEGQARTAQKKVEIAERLINDITGNWGVDES | |
| | | | SILIDTLTFTIATGQEESRRDGIETIEAIRELKKRHPDVQTT | |
| | | | LGLSNISFGLNPAARQVLNSVFLHECQEAGLDSAIVHASKIL | |
| | | | PMNRIPEEQRNVALDLVYDRRREDYDPLQELMRLFEGVSAAS | |
| | | | SKEDRLAELAGLPLFERLAQRIVDGERNGLDADLDEANTQKP | |
| | | | PLQIINEHLLAGMKTVGELFGSGQMQLPFVLQSAEVMKAAVA | |
| | | | YLEPHMERSDDDSGKGRIVLATVKGDVHDIGKNLVDIILSNN | |
| | | | GYEVVNIGIKQPIATILEVAEDKSADVVGMSGLLVKSTVVMK | |
| | | | ENLEEMNTRGVAEKFPVLLGGAALTRSYVENDLAEIYQGEVH | |
| | | | YARDAFEGLKLMDTIMSAKRGEAPDENSPEAIKAREKEAERK | |
| | | | ARHQRSKRIAAQRKAAEEPVEVPERSDVAADIEVPAPPFWGS | |
| | | | RIVKGLAVADYTGLLDERALFLGQWGLRGQRGGEGPSYEDLV | |
| | | | ETEGRPRLRYWLDRLSTDGILAHAAVVYGYFPAVSEGNDIVV | |
| | | | LTEPKPDAPVRYRFHFPRQQRGRFLCIADFIRSRELAAERGE | |
| | | | VDVLPFQLVTMGQPIADFANELFASNAYRDYLEVHGIGVQLT | |
| | | | EALAEYWHRRIREELKFSGDRAMAAEDPEAKEDYFKLGYRGA | |
| | | | RFAFGYGACPDLEDRAKMMALLEPERIGVTLSEELQLHPEQS | |
| | | | TDAFVLHHPEAKYFNV | |
| metH | Mycobacterium | AA17182.1 | MRVTAANQHQYDTDLLETLAQRVMVGDGAMGTQLQDAELTLD | 73 |
| | leprae (use this | | DFRGLEGCNEILNETRPDVLETIHRRYFEAGADLVETNTFGC | |
| | to clone M. | | NLSNLGDYDIADKIRDLSQRGTVIARRVADELTTPDHKRYVL | |
| | smegmatis | | GSMGPGTKLPTLGHTEYRVVRDAYTESALGMLDGGADAVLVE | |
| | gene) | | TCQDLLQLKAAVLGSRRANTQAGRHIPVFVHVTVETTGTMLL | |
| | | | GSEIGAALAAVEPLGVDMIGLNCATGPAEMSEHLRHLSKHAR | |
| | | | IPVSVMPNAGLPVLGAKGAEYPLQPDELAEALAGFIAEFGLS | |
| | | | LVGGCCGTTPDHIREVAAAVARCNDGTVPRGERHVTYEPSVS | |
| | | | SLYTAIPFAQKPSVLMIGERTNANGSKVFREANIAEDYQKCL | |
| | | | DIAKDQTRGGAHLLDLCVDYVGRNGVADMKALAGRLATVSTL | |
| | | | PIMLDSTEIPVLQAGLEHLGGRCVUJSVNYEDGDGPESRFVK | |
| | | | TMELVAEHGAAVVALTIDEQGQARTVEKKVEVAERLINDITS | |
| | | | NWGVDKSAILIDCLTFTIATGQEESRKDGIETIDAIRELKKR | |
| | | | HPAVQTTLGLSNISFGLNPSARQVLNSVFLHECQEAGLDSAI | |
| | | | VHASKILPINRIPEEQRQAALDLVYDRRREGYDPLQKLMWLF | |
| | | | KGVSSPSSKETREAELAKLPLFDRLAQRIVDGERNGLDVDLD | |
| | | | EAMTQKPPLAIINENLLDGMKTVGELFGSGQMQLPFVLQSAE | |
| | | | VMKAAVAYLEPHMEKSDCDFGKGLAKGRIVLATVKGDVHDIG | |
| | | | KNLVDIILSNNGYEVVNLGIKQPITNILEVAEDKSADVVGMS | |
| | | | GLLVKSTVIMKENLEEMNTRGVAEKFPVLLGGAALTRSYVEN | |
| | | | DLAEVYEGEVHYARDAFEGLKLMDTIMSAKRGEALAPGSPES | |
| | | | LAAEADRNKETERKARHERSKRIAVQRKAAEEPVEVPERSDV | |
| | | | PSDVEVPAPPFWGSRIIKGLAVADYTGFLDERALFLGQWGLR | |
| | | | GVRGGAGPSYEDLVQTEGRPRLRYWLDRLSTYGVLAYAAVVY | |
| | | | GYFPAVSEDNDIVVLAEPRPDAEQRYRFTFPRQQRGRFLCIA | |
| | | | DFIRSRDLATERSEVDVLPFQLVTMGQPIADFVGELFVSNSY | |
| | | | RDYLEVHGIGVQLTEALAEYWHRRIREELKFSGNRTMSADDP | |
| | | | EAVEDYFKLGYRGARFAFGYGACPDLEDRIKMMELLQPERIG | |
| | | | VTISEELQLHPEQSTDAFVLHHPAAKYFNV | |
| metH | Lactobacillus | CAD63851 | MKFKQALQQRVLVADGAMGTLLYGNYGINSAFENLNLTHPDT | 74 |
| | plantarum | | ILRVHRSYIPAGADIIQTNTYAANRLKLTRYDLQDQVTTINQ | |
| | | | AAVKIAATAREHADHPVYILGTIGGLAGDTDATVQRATPATI | |
| | | | AASVTEQLTALLATNQLDGILLETYYDLPELLAALKIVKAHT | |
| | | | DLPVITNVSMLAPGVLRNGTSFTDAIVQLNAAGADVIGTNCR | |
| | | | LGPYYLAQSFENLAIPANVKLAVYPNAGLPGTDQDGAVVYDG | |
| | | | EPSYFEEYAERFRQLGLNIIGGCCGTTPLHTSATVRGLSNRS | |
| | | | IVAHDQPATKPQPPTLVTTKSQHRFLQKVATQKTALVELDPP | |
| | | | RDFDTTKFFRGAERLKAAGVDGITLSDNSLATVRIANTTIAA | |
| | | | QLKLNYGITPIVHLTTRDHNLIGLQSEIMGLHSLGIEDILAI | |
| | | | TGDPAKLGDFPGATSVSDVRSVELMKLIKQFNSGIGPTGKSL | |
| | | | KEASDFRVAGAFNPNAYRTSISTKSISRKLSYGCDYIITQPV | |
| | | | YDLANVDALADALAANHVNVPVFVGVMPLVSRRNAEFLHHEV | |
| | | | HGIRIPEPILTRMAEAEQTGNERAVGIAIAKELIDGICARFN | |
| | | | GVHIVTPFNRFKTVIELVDYIQQKNLIKVQ | |
| metH | Coryne- | CAD26709 | MSTSVTSPAHNNAHSSEFLDALANHVLIGDGAMGTQLQGFDL | 222 |
| | bacterium | | DVEKDFLDLEGCNEILNDTRPDVLRQIHRAYFEAGADLVETN | |
| | glutamicum | | TFGCNLPNLADYDIADRCRELAYKGTAVAREVADEMGPGRNG | |
| | | | MRRFVVGSLGPGTKLPSLGHAPYADLRGHYKEAAWGIIDGGG | |
| | | | DAFLIETAQDLLQVKAAVHGVQDANAELDTFLPIICHVTVET | |
| | | | TGTNLMGSEIGAALTALQPLGIDMIGLNCATGPDEMSEHLRY | |
| | | | LSKHADIPVSVMPNAGLPVLGKNGAEYPLEAEDLAQALAGFV | |
| | | | SEYGLSMVGGCCGTTPEHIRAVRDAVVGVPEQETSTLTKIPA | |
| | | | GPVEQASREVEKEDSVASLYTSVPLSQETGISMIGERTNSNG | |
| | | | SKAFREAMLSGDWEKCVDIAKQQTRDGAHMLDLCVDYVGRDG | |
| | | | TADMATLAALLATSSTLPIMIDSTEPEVIRTGLEHLGGRSIV | |
| | | | NSVNFEDGDGPESRYQRIMKLVKQHGAAVVALTIDEEGQART | |
| | | | AEHKVRIAKRLIDDITGSYGLDIKDIVVDCLTFPISTGQEET | |
| | | | RRDGIETIEAIRELKKLYPEIHTTLGLSNISFGLNPAARQVL | |
| | | | NSVFLNECIEAGLDSAIAHSSKILPMNRIDDRQREVALDMVY | |
| | | | DRRTEDYDPLQEFMQLFEGVSAADAKDAPAEQLAAMPLFERL | |
| | | | AQRIIDGDKRGLEDDLEAGMKEKSPIAIINEDLLNGMKTVGE | |
| | | | LFGSGQMQLPFVLQSAETMKTAVAYLEPFMEEEAEATGSAQA | |
| | | | EGKGKIVVATVKGDVHDIGKNLVDIILSNNGYDVVNLGIKQP | |
| | | | LSAMLEAAEEHKADVIGMSGLLVKSTVVMKENLEEMNNAGAS | |
| | | | NYPVILGGAALTRTYVENDLNEVYTGEVYYARDAFEGLRLMD | |
| | | | EVMAEKRGEGLDPNSPEAIEQAKKKAERKARNERSRKIAAER | |
| | | | KANAAPVIVPERSDVSTDTPTAAPPFWGTRIVKGLPLAEFLG | |
| | | | NLDERALFMGQWGLKSTRGNEGPSYEDLVETEGRPRLRYWLD | |
| | | | RLKSEGILDHVALVYGYFPAVAEGDDVVILESPDPHAAERMR | |
| | | | FSFPRQQRGRFLCIADFIRPREQAVKDGQVDVMPFQLVTMGN | |
| | | | PIADFANELFAANEYREYLEVHGIGVQLTEALAEYWHSRVRS | |
| | | | ELKLNDGGSVADFDPEDKTKFFDLDYRGARFSFGYGSCPDLE | |
| | | | DRAKLVELLEPGRIGVELSEELQLHPEQSTDAFVLYHPEAKY | |
| | | | FNV | |
| metH | Escherichia coli | P13009 | MSSKVEQLPAQLNERILVLDGGMGTMIQSYRLNEADFRGERF | 223 |
| | | | ADWPCDLKGNNDLLVLSKPEVIAAIHNAYFEAGADIIETNTF | |
| | | | NSTTIAMADYQMESLSAEINFAAAKLARRCADEWTARTPEKP | |
| | | | RYVAGVLGPTNRTASISPDVNDPAFRNITFDGLVAAYRESTK | |
| | | | ALVEGGADLILIETVFDTLNAKAAVFAVKTEFEALGVELPIM | |
| | | | ISGTITDASGRTLSGQTTEAFYNSLRHAEALTFGLNCALGPD | |
| | | | ELRQYVQELSRIAECYVTAHPNAGLPNAFGEYDLDADTMAKQ | |
| | | | IREWAQAGFLNIVGGCCGTTPQHIAAMSRAVEGLAPRKLPEI | |
| | | | PVACRLSGLEPLNIGEDSLFVNVGERTNVTGSAKFKRLIKEE | |
| | | | KYSEALDVARQQVENGAQIIDINMDEGMLDAEAAMVRFLNLI | |
| | | | AGEPDIARVPIMIDSSKWDVIEKGLKCIQGKGIVNSISMKEG | |
| | | | VDAFIHHAKLLRRYGAAVVVMAFDEQGQADTRARKIEICRRA | |
| | | | YKILTEEVGFPPEDIIFDPNIFAVATGIEEHNNYAQDFIGAC | |
| | | | EDIKRELPHALISGGVSIVSFSFRGNDPVREAIHAVFLYYAI | |
| | | | RNGMDMGIVNAGQLAIYDDLPAELRDAVEDVILNRRDDGTER | |
| | | | LLELAEKYRGTKTDDTANAQQAEWRSWEVNKRLEYSLVKGIT | |
| | | | EFIEQDTEEARQQATRPIEVIEGPLMDGMNVVGDLFGEGKMF | |
| | | | LPQVVKSARVMKQAVAYLEPFIEASKEQGKTNGKMVIATVKG | |
| | | | DVHDIGKNIVGVVLQCNNYEIVDLGVMVPAEKILRTAKEVNA | |
| | | | DLIGLSGLITPSLDEMVNVAKEMERQGFTIPLLIGGATTSKA | |
| | | | HTAVKIEQNYSGPTVYVQNASRTVGVVAALLSDTQRDDFVAR | |
| | | | TRKEYETVRIQHGRKKPRTPPVTLEAARDNDFAFDWQAYTPP | |
| | | | VAHRLGVQEVEASIETLRNYIDWTPFFMTWSLAGKYPRILED | |
| | | | EVVGVEAQRLFKDANDMLDKLSAEKTLNPRGVVGLFPANRVG | |
| | | | DDIEIYRDETRTHVINVSHHLRQQTEKTGFANYCLADFVAPK | |
| | | | LSGKADYIGAFAVTGGLEEDALADAFEAQHDDYNKIMVKALA | |
| | | | DRLAEAFAEYLHERVRKVYWGYAPNENLSNEELIRENYQGIR | |
| | | | PAPGYPACPEHTEKATIWELLEVEKHTGMKLTESFAMWPGAS | |
| | | | VSGWYFSHPDSKYYAVAQIQRDQVEDYARRKGMSVTEVERWL | |
| | | | APNLGYDAD | |
| metE | Mycobacterium | CAB09044 | MTQPVRRQPFTATITGSPRIGPRRELKPATEGYWAGRTSRSE | 75 |
| | tuberculosis (use | | LEAVAATLRRDTWSALAAAGLDSVPVNTFSYYDQMLDTAVLL | |
| | this to clone M. | | GALPPRVSPVSDGLDRYFAAARGTDQIAPLEMTKWFDTNYHY | |
| | smegmatis | | LVPEIGPSTTFTLHPGKVLAELKEALGQGIPARPVIIGPITF | |
| | gene) | | LLLSKAVDGAGAPIERLEELVPVYSELLSLLADGGAQWVQFD | |
| | | | EPALVTDLSPDAPALAEAVYTALCSVSNRPAIYVATYFGDPG | |
| | | | AALPALARTPVEAIGVDLVAGADTSVAGVPELAGKTLVAGVV | |
| | | | DGRNVWRTDLEAALGTLATLLGSAATVAVSTSCSTLHVPYSL | |
| | | | EPETDLDDALRSWLAFGAEKVREVVVLARALRDGHDAVADEI | |
| | | | ASSRAAIASRKRDPRLHNGQIRAPIEAIVASGAHRGNAAQRR | |
| | | | ASQDARLHLPPLPTTTIGSYPQTSAIRVARAALPAGEIDEAE | |
| | | | YVRRMRQEITEVIALQERLGLDVLVHGEPERNDMVQYFAEQL | |
| | | | AGFFATQNGWVQSYGSRCVRPPILYGDVSRPRAMTVEWITYA | |
| | | | QSLTDKPVKGMLTGPVTILAWSFVRDDQPLADTANQVALAIR | |
| | | | DETVDLQSAGIAVIQVDEPALRELLPLRRADQAEYLRWAVGA | |
| | | | FRLATSGVSDATQIHTHLCYSEFGEVIGAIADLDADVTSTEA | |
| | | | ARSHMEVLDDLNAIGFANGVGPGVYDIHSPRVPSAEEMADSL | |
| | | | RAALRAVPAERLWVNPDCGLKTRNVDEVTASLHNMVAAAREV | |
| | | | RAG | |
| metE | Mycobacterium | CAB08123 | MDELVTTQSFTATVTGSPRIGPRRELKRATEGYWAKRTSRSE | 76 |
| | leprae (use this | | LESVASTLRRDMWSDLAAAGLDSVPVNTFSYYDQMLDTAFML | |
| | to clone M. | | GALPARVAQVSDDLDQYFALARGNNDIKPLEMTKWFDTNYHY | |
| | smegmatis | | LVPEIEPATTFSLNPGKILGELKEALEQRIPSRPVIIGPVTF | |
| | gene) | | LLLSKGINGGGAPIQRLEELVGIYCTLLSLLAENGARWVQFD | |
| | | | EPALVTDLSPDAPALAEAVYTALGSVSKRPAIYVATYFGNPG | |
| | | | ASLAGLARTPIEAIGVDFVCGADTSVAAVPELAGKTLVAGIV | |
| | | | DGRNIWRTDLESALSKLATLLGSAATVAVSTSCSTLHVPYSL | |
| | | | EPETDLDDNLRSWLAFGAEKVAEVVVLAPALRDGRDAVADEI | |
| | | | AASNAAVASRRSDPRLHNGQVRARIDSIVASGTHRGDAAQRR | |
| | | | TSQDARLHLPPLPTTTIGSYPQTSAIRKARAALQDAEIDEAE | |
| | | | YISRMKKEVADAIKLQEQLGLDVLVHGEPERNDMVQYFAEQL | |
| | | | GGFFATQNGWVQSYGSRCVRPPILYGDVSRPHPMTIEWITYA | |
| | | | QSLTDKPVKGMLTGPVTILAWSFVRDDQPLADTANQVALAIR | |
| | | | DETVDLQSAGIAIIQVDEPALRELLPLRRADQDEYLCWAVKA | |
| | | | FRLATSGVADSTQIHTHLCYSEFGEVIGAIADLDADVTSIEA | |
| | | | ARSHMEVLDDLNAVGFANSIGPGVYDIHSPRVPSTDEIAKSL | |
| | | | RAALKAIPMQRLWVNPDCGLKTRSVDEVSASLQNMVAAARQV | |
| | | | RAGA | |
| metE | Streptomyces | CAC44335 | MTAKSAAAAARATVYGYPRQGPNRELKKAIEGYWKGRVSAPE | 77 |
| | coelicolor | | LRSLAADLRAANWRRLADAGIDEVPAGDFSYYDHVLDTTVMV | |
| | | | GAIPERHRAAVAADALDGYFANARGTQEVAPLEMTKWFDTNY | |
| | | | HYLVPELGPDTVFTADSTKQVTELAEAVALGLTARPVLVGPV | |
| | | | TYLLLAKPAPGAPADFEPLTLLDRLLPVYAEVLTDLRAAGAE | |
| | | | WVQLDEPAFVQDRTPAELNALERAYRELGALTDRPKLLVASY | |
| | | | FDRLGDALPVLAKAPIEGLALDFTDAAATNLDALAAVGGLPG | |
| | | | KRLVAGVVNGRNIWINDLQKSLSTLGTLLGLADRVDVSASCS | |
| | | | LLHVPLDTGAERDIEPQILRWLAFARQKTAEIVTLAKGLAQG | |
| | | | TDAITGELAASRADMASRAGSPITRNPAVRARAEAVTDDDAR | |
| | | | RSQPYAERTAAQPAHLGLPPLPTTTIGSFPQTGEIRAARADL | |
| | | | RDGRIDIAGYEERIPAEIQEVISFQEKTGLDVLVHGEpERND | |
| | | | MVQYFAEQLTGYLATQHGWVQSYGTRYVRPPILAGDISRPEP | |
| | | | MTVRWTTYAQSLTEKPVKGMLTGPVTMLAWSFVRDDQPLGDT | |
| | | | ARQVALALRDEVNDLEAAGTSVIQVDEPALRETLPLPAADHT | |
| | | | AYLAWATEAFRLTTSGVRPDTQIHTHMCYAEFGDIVQAIDDL | |
| | | | DADVISLEAARSHMQVAHELATHGYPREAGPGVYDIHSPRVP | |
| | | | SAEEAAALLRTGLKAIPAERLWVNPDCGLKTRGWPETRASLE | |
| | | | NLVATARTLRGELSAS | |
| metE | Coryne- | CAD26711 | MTSNFSSTVAGLPRIGAKRELKFALEGYWNGSIEGRELAQTA | 224 |
| | bacterium | | RQLVNTASDSLSGLDSVPFAGRSYYDAMLDTAAILGVLPERF | |
| | glutamicum | | DDIADHENDGLPLWIDRYFGAARGTETLPAQAMTKWFDTNYH | |
| | | | YLVPELSADTRFVLDASALIEDLRCQQVRGVNARPVLVGPLT | |
| | | | FLSLARTTDGSNPLDHLPALFEVYERLIKSFDTEWVQIDEPA | |
| | | | LVTDVAPEVLEQVRAGYTTLAKRDGVFVNTYFGSGDQALNTL | |
| | | | AGIGLGAIGVDLVTHGVTELAAWKGEELLVAGIVDGRNIWRT | |
| | | | DLCAALASLKRLAARGPIAVSTSCSLLHVPYTLEAENIEPEV | |
| | | | RDWLAFGSEKITEVKLLADALAGNIDAAAFDAASAAIASRRT | |
| | | | SPRTAPITQELPGRSRGSFDTRVTLQEKSLELPALPTTTIGS | |
| | | | FPQTPSIRSARARLRKESITLEQYEEAMREEIDLVIAKQEEL | |
| | | | GLDVLVHGEPERNDMVQYFSELLDGFLSTANGWVQSYGSRCV | |
| | | | RPPVLFGNVSRPAPMTVKWFQYAQSLTQKEVKGMLTGPVTIL | |
| | | | AWSFVRDDQPLATTADQVALALRDEINDLIEAGAKIIQVDEP | |
| | | | AIRELLPLRDVDKPAYLQWSVDSFRLATAGAPDDVQIHTHMC | |
| | | | YSEFNEVISSVIALDADVTTIEAARSDMQVLAALKSSGFELG | |
| | | | VGPGVWDIHSPRVPSAQEVDGLLEAALQSVDPRQLWVNpDCG | |
| | | | LKTRGWPEVEASLKVLVESAKQAREKIGATI | |
| metE | Escherichia coli | Q8FBM1 | MTILNHTLGFPRVGLRRELKKAQESYWAGNSTREELLAVGRE | 225 |
| | | | LRARHWDQQKQAGIDLLPVGDFAWYDHVLTTSLLLGNVPPRH | |
| | | | QNKDGSVDIDTLFRIGRGRAPTGEPAAAAEMTKWFNTNYHYM | |
| | | | VPEFVKGQQFKLTWTQLLEEVDEALALGHKVKPVLLGPITYL | |
| | | | WLGKVKGEQFDRLSLLNDILPVYQQVLAELAKRGIEwVQIDE | |
| | | | PALVLELPQAWLDAYKPAYDALQGQVKLLLTTYFEGVTPNLD | |
| | | | TITALPVQGLHVDLVHGKDDVAELHKRLPSDWLLSAGLINGR | |
| | | | NVWRADLTEKYAQIKDIVGKRDLWVASSCSLLHSPIDLSVET | |
| | | | RLDAEVKSWFAFALQKCHELALLRDALNSGDTAALAEWSAPI | |
| | | | QARRHSTRVHNPAVEKRLAAITAQDSQRANVYEVRAEAQRAR | |
| | | | FKLPAWPTTTIGSFPQTTEIRTLRLDFKKGNLDANNYRTGIA | |
| | | | EHIKQAIVEQERLGLDVLVHGEAERNDMVEYFGEHLDGFVFT | |
| | | | QNGWVQSYGSRCVKPPIVIGDVSRPAPITVEWAKYAQSLTDK | |
| | | | PVKGMLTGPVTILCWSFPREDVSRETIAKQIALALRDEVADL | |
| | | | EAAGIGIIQIDEPALREGLPLRRSDWDAYLQWGVEAFRINAA | |
| | | | VAKDDTQIHTHMCYCEFNDIMDSIAALDADVITIETSRSDME | |
| | | | LLESFEEFDYPNEIGPGVYDIHSPNVPSVEWIEALLKKAAKR | |
| | | | IPAERLWVNPDCGLKTRGWPETRAALANMVQAAQNLRRG | |
| glyA | Streptomyces | CAA20173 | MSLLNTPLHELDPDVAAAVDAELDRQQSTLEMIASENFAPVA | 78 |
| | coelicolor | | VMEAQGSVLTNKYAEGYPGRRYYGGCEHVDVVEQIAIDRVKA | |
| | | | LFGAEHANVQPHSGAQANAAAMFALLKPGDTIMGLNLAHGGH | |
| | | | LTHGMKINFSGKLYNVVPYHVGDDGQVDMAEVERLAKETKPK | |
| | | | LIVAGWSAYPRQLDFAAFRKVADEVGAYLMVDMAHFAGLVAA | |
| | | | GLHPNPVPHAHVVTTTTHKTLGGPRGGVILSTAELAKKINSA | |
| | | | VFPGQQGGPLEHVVAAKAVAFKVAASEDFKERQGRTLEGARI | |
| | | | LAERLVRDDAKAAGVSVLTGGTDVHLVLVDLRDSELDGQQAE | |
| | | | DRLHEVGITVNRNAVPNDPRPPMVTSGLRIGTPALATRGFTA | |
| | | | EDFAEVADVIAEALKPSYDAEALKARVKTLADKHPLYPGLNK | |
| glyA | Thermobifide | ZP_00058615 | MKVRKLMTAQSTSLTQSLAQLDPEVAAAVDAELARQRDTLEM | 79 |
| | fusca | | IASENFAPPAVLEAQGTVLTNKYAEGYPGRRYYGGCEHVDVI | |
| | | | EQLAIDRAKALFGAEHANVQPHSGAQANTAVYFALLQPGDTI | |
| | | | LGLDLAHGGHLTHGMRINYSGKILNAVAYHVRESDGLIDYDE | |
| | | | VEALAKEHQPKLIIAGWSAYPRQLDFARFREIADQTGALLMV | |
| | | | DMAHFAGLVAAGLHPNPVPYADVVTTTTHKTLGGPRGGLILA | |
| | | | KEELGKKIMSAVFPGMQGGPLQHVIAAKAVALKVAASEEFAE | |
| | | | RQRRTLSGAKILAERLTQPDAAEAGIRVLTGGTDVHLVLVDL | |
| | | | VNSELNGKEAEDRLHEIGITVNRNAVPNDPRPPMVTSGLRIG | |
| | | | TPALATRGFGDADFAEVADIIAEALKPGFDAATLRSRVQALA | |
| | | | AKHPLYPGL | |
| glyA | Mycobacterium | AAK45383 | MSAPLAEVDPDIAELLAKELGRQRDTLEMIASENFAPRAVLQ | 80 |
| | tuberculosis (use | | AQGSVLThKYAEGLPGRRYYGGCEHVDVVENLARDRAKALFG | |
| | this to clone M. | | AEFANVQPHSGAQANAAVLHALMSPGERLLGLDLANGGHLTH | |
| | smegmatis | | GMRLHFSGKLYENGFYGVDPATHLIDMDAVPATALEFRPKVI | |
| | gene) | | IAGWSAYPRVLDFAAFRSIADEVGAKLLVDMAHFAGLVAAGL | |
| | | | HPSPVPHADVVSTTVHKTLGGGRSGLIVGKQQYAKAINSAVF | |
| | | | PGQQGGPLMHVIAGKAVALKIAATPEFADRQRRTLSGARIIA | |
| | | | DRLMAPDVAKAGVSVVSGGTDVHLVLVDLRDSPLDGQAAEDL | |
| | | | LHEVGITVNRNAVPNDPRPPMVTSGLRIGTPALATRGFGDTE | |
| | | | FTEVADIIATALATGSSVDVSALKDRATRLARAFPLYDGLEE | |
| | | | WSLVGR | |
| glyA | Mycobacterium | CAB39828 | MVAPLAEVDPDIAELLGKELGRQRDTLEMIASENFVPRSVLQ | 81 |
| | leprae (use this | | AQGSVLTNKYAEGLPGRRYYDGCEHVDVVENIARDRAKALFG | |
| | to clone M. | | ADFANVQPHSGAQANAAVLHALMSPGERLLGLDLANGGHLTH | |
| | smegmatis | | GMRLNFSGKLYETGFYGVDATTHLIDMDAVRAKALEFRPKVL | |
| | gene) | | IAGWSAYPRILDFAAFRSIADEVGAKLWVDMAHFAGLVAVGL | |
| | | | HPSPVPHADVVSTTVHKTLGGGRSGLILGKQEFATAINSAVF | |
| | | | PGQQGGPLMHVIAGKAVALKIATTPEFTDRQQRTLAGARILA | |
| | | | DRLTAADVTKAGVSVVSGGTDVHLVLVDLRNSPFDGQAAEDL | |
| | | | LHEVGITVNRNVVPNDPRPPMVTSGLRIGTPALATRGFGEAE | |
| | | | FTEVADIIATVLTTGGSVDVAALRQQVTRLARDFPLYGGLED | |
| | | | WSLAGR | |
| glyA | Lactobacillus | CAD64690 | MNYQEQDPEVWAAISKEQARQQHNIELIASEHIVSKGVRAAQ | 82 |
| | plantarum | | GSVLTNKYSEGYPGHRFYGGNEYIDQVETLAIERAKKLFGAE | |
| | | | YANVQPHSGSQANAAAYMALIQPGDRVMGMSLDAGGHLTHGS | |
| | | | SVNFSGKLYDFQGYGLDPETAELNYDAILAQAQDFQPKLIVA | |
| | | | GASAYSRLIDFKKFREIADQVGALLMVDMAHIAGLVAAGLHP | |
| | | | NPVPYADVVTTTTHKTLRGPRGGMILAKEKYGKKINSAVFPG | |
| | | | NQGGPLDHVIAGKAIALGEDLQPEFKVYAQHIIDNAKAMAKV | |
| | | | FNDSDLVRVISGGTDNHLMTIDVTKSGLNGRQVQDLLDTVYI | |
| | | | TVNKEAIPNETLGAFKTSGIRLGTPAITTRGFDEADATKVAE | |
| | | | LILQALQAPTDQANLDDVKQQAMALTAKHPIDVD | |
| glyA | Coryne- | AAK60516 | MTDAHQADDVRYQPLNELDPEVAAAIAGELARQRDTLEMIAS | 226 |
| | bacterium | | ENFVPRSVLQAQGSVLTNKYAEGYPGRRYYGGCEQVDIIEDL | |
| | glutamicum | | ARDRAKALFGAEFANVQPHSGAQANAAVLMTLAEPGDKIMGL | |
| | | | SLAHGGHLTHGMKLNFSGKLYEVVAYGVDPETMRVDMDQVRE | |
| | | | IALKEQPKVIIAGWSAYPRHLDFEAFQSIAAEVGAKLWVDMA | |
| | | | HFAGLVAAGLHPSPVPYSDVVSSTVHKTLGGPRSGIILAKQE | |
| | | | YAKKLNSSVFPGQQGGPLMHAVAAKATSLKIAGTEQFRDRQA | |
| | | | RTLEGARILAERLTASDAKAAGVDVLTGGTDVHLVLADLRNS | |
| | | | QMDGQQAEDLLHEVGITVNRNAVPFDPRPPMVTSGLRIGTPA | |
| | | | LATRGFDIPAFTEVADIIGTALANGKSADIESLRGRVAKLAA | |
| | | | DYPLYEGLEDWTIV | |
| glyA | Escherichia coli | P00477 | MLKREMNIADYDAELWQAMEQEKVRQEEHIELIASENYTSPR | 227 |
| | | | VMQAQGSQLTNKYAEGYPGKRYYGGCEYVDIVEQLAIDRAKE | |
| | | | LFGADYANVQPHSGSQANFAVYTALLEPGDTVLGMNLAHGGH | |
| | | | LTHGSPVNFSGKLYNIVPYGIDATGHIDYADLEKQAKEHKPK | |
| | | | MIIGGFSAYSGVVDWAKMREIADSIGAYLFVDMAHVAGLVAA | |
| | | | GVYPNPVPHAHVVTTTTHKTLAGPRGGLILAKGGSEELYKKL | |
| | | | NSAVFPGGQGGPLMHVIAGKAVALKEAMEPEFKTYQQQVAKN | |
| | | | AKAMVEVFLERGYKVVSGGTDNHLFLVDLVDKNLTGKEADAA | |
| | | | LGRANITVNKNSVPNDPKSPFVTSGIRVGTPAITRRGFKEAE | |
| | | | AKELAGWMCDVLDSINDEAVIERIKGKVLDICARYPVYA | |
| metE | Thermobifida | ZP_00056753 | MASRAASTGSHSAPISSSSGRRLATKAASSASTRGRTKATGD | 83 |
| | fusca | | KCEELIRAGYRLFRRPSSPRHTQTPPIWSITVGDMLGSPTPR | |
| | | | PAPRPRRISELLARKEPTFSFEFFPPKTPEGERMLWRAIREI | |
| | | | EALRPSFVSVTYGAGGSTRDRTVNVTEKIATNTTLLPVAHIT | |
| | | | AVNHSVRELRHLIGRFAAAGVCNMLAIRGDPPGDPLGEWVKH | |
| | | | PEGLTHAEELVRLIKESGDFCVGVAAFPYKHPRSPDVETDTD | |
| | | | FFVRKCRAGADYAITQMFFEAEDYLRLRDRVAARGCDVPIIP | |
| | | | EIMPVTKFSTIARSEQLSGAPFPRRLAEEFERVADDPEAVRA | |
| | | | LGIEHATRLCERLLAEGAPGIHFITFNRSTATREVYHRLVGA | |
| | | | TQPAAVAALP | |
| metF | Streptomyces | CAB52012 | MALGTASTRTDPARTVRDILATGKTTYSFEFSAPKTPKGERN | 84 |
| | coelicolor | | LWSALRRVEAVAPDFVSVTYGAGGSTRAGTVRETQQIVADTT | |
| | | | LTPVAHLTAVDHSVAELRNIIGQYADAGIRNMLAVRGDPPGD | |
| | | | PNADWIAHPEGLTYAAELVRLIKESGDFCVGVAAFPEMHPRS | |
| | | | ADWDTDVTNFVDKCRAGADYAITQMFFQPDSYLRLRDRVAAA | |
| | | | GCATPVIPEVMPVTSVKMLERLPKLSNASFPAELKERILTAK | |
| | | | DDPAAVRSIGIEFATEFCARLLAEGVPGLHFITLNNSTATLE | |
| | | | IYENLGLHHPPPA | |
| metE | Coryne- | CAD26762 | MVEVNKCQRQSQQNTLITLRYPGMSLTNIPASSQWAISDVLK | 228 |
| | bacterium | | RPSPGRVPFSVEFMPPRDDAAEERLYRAAEVFHDLGASFVSV | |
| | glutamicum | | TYGAGGSTRERTSRIARRLAKQPLTTLVHLTLVNBTREEMKA | |
| | | | ILREYLELGLTNLLALRGDPPGDPLGDWVSTDGGLNYASELI | |
| | | | DLIKSTPEFREFDLGIASFPEGHFRAKTLEEDTKYTLAKLRG | |
| | | | GAEYSITQMFFDVEDYLRLRDRLVAADPIHGAKPIIPGIMPI | |
| | | | TELRSVRRQVELSGAQLPSQLEESLVRAANGNEEANKDEIRK | |
| | | | VGIEYSTNMAERLIAEGAEDLHFMTLNFTRATQEVLYNLGMA | |
| | | | PAWGAEHGQDAVR | |
| metF | Escherichia coli | NP_418376 | MSFFHASQRDALNQSLAEVQGQINVSFEFFPPRTSEMEQTLW | 229 |
| | | | NSIDRLSSLKPKFVSVTYGANSGERDRTHSIIKGIKDRTGLE | |
| | | | AAPHLTCIDATPDELRTIARDYWNNGIRHIVALRGDLPPGSG | |
| | | | KPEMYASDLVTLLKEVADFDISVAAYPEVHPEAKSAQADLLN | |
| | | | LKRKVDAGANPAITQFFFDVESYLRFRDRCVSAGIDVEIIPG | |
| | | | ILPVSNFKQAKKFADMTNVRIPAWMAQMFDGLDDDAETRKLV | |
| | | | GANIAMDMVKILSREGVKDFHFYTLNRAEMSYAICHTLGVRP | |
| | | | GL | |
| cysE | Mycobacterium | K46690 | MLTAMRGDIRAARERDPAAPTALEVIFCYPGVHAVWGHRLAH | 85 |
| | tuberculosis (use | | WLWQRGARLLAPAAAEFTRILTGVDIHPGAVIGARVFIDHAT | |
| | this to clone M. | | GVVIGETAEVGDDVTIYHGVTLGGSGMVGGKRHPTVGDRVII | |
| | smegmatis | | GAGAKVLGPIKIGEDSRIGANAVVVKPVPPSAVVVGVPGQVI | |
| | gene) | | GQSQPSPGGPFDWRLPDLVGASLDSLLTRVARLDALGGGPQA | |
| | | | AGVIRPPEAGIWHGEDFSI | |
| cysE | Mycobacterium | CAB11413 | MFAAIRRDIQAARQRDPAQPTVLEVICCYPGVHAVWGHRISH | 86 |
| | leprae (use this | | WLWNRRARLAARAFAELTRILTGVDIHPGAVLGAGLFIDHAT | |
| | to clone M. | | GVVIGETAEVGDDVTIFHGVTLGGTGRETGKRHPTIGDRVTI | |
| | smegmatis | | GAGAKVLGAIKIGEDSRIGANAVVVKEVPASAVAVGVPGQII | |
| | gene) | | SSDSPANGDDSVLPDFVGVSLQSLLTRVAKLEAEDGGSQTYR | |
| | | | VIRLPEAGVWHGEDFSI | |
| cysE | Lactobacillus | CAD62911 | MFQTARAILNRDPAAINLRTVMLTYPGIHALAWYRVAHYFET | 87 |
| | plantarum | | HRLPLLAALLSQHAARHTGILIHPAAQIGHRVFFDHGIGTVI | |
| | | | GATAVIEDDVTILHGVTLGARKTEQAGRRHPYVCRGAFIGAH | |
| | | | AQLLGPITIGANSKIGAGAIVLDSVPAHVTAVGNPAHLVATQ | |
| | | | LHAYHEATSNQA | |
| cysE | Coryne- | CAD34661 | MLSTIKMIREDLANAREHDPAARGDLENAVVYSGLHAIWAHR | 230 |
| | bacterium | | VANSWWKSGFRGPARVLAQFTRFLTGIEIHPGATIGRRFFID | |
| | glutamicum | | HGMGIVIGETAEIGEGVMLYHGVTLGGQVLTQTKRHPTLCDN | |
| | | | VTVGAGAKILGPITIGEGSAIGANAVVTKDVPAEHIAVGIPA | |
| | | | VARPRGKTEKIKLVDPDYYI | |
| cysE | Escherichia coli | NP_418064 | MSCEELEIVWNNIKAEARTLADCEPMLASFYHATLLKHENLG | 231 |
| | | | SALSYMLANKLSSPIMPAIAIREVVEEAYAADPEMIASAACD | |
| | | | IQAVRTRDPAVDKYSTPLLYLKGFHALQAYRIGHWLWNQGRR | |
| | | | ALAIFLQNQVSVTFQVDIHPAAKIGRGIMLDHATGIVVGETA | |
| | | | VIENDVSILQSVTLGGTGKSGGDRHPKIREGVMIGAGAKILG | |
| | | | NIEVGRGAKIGAGSVVLQPVPPHTTAAGVPARIVGKPDSDKP | |
| | | | SMDMDQHFNGINHTFEYGDGI | |
| serA | Mycobacterium | CAA16081 | MSLPVVLIADKLAPSTVAALGDQVEVRWVDGPDRDKLLAAVP | 88 |
| | tuberculosis (use | | EADALLVRSATTVDAEVLAAAPKLKIVARAGVGLDNVDVDAA | |
| | this to clone M. | | TARGVLVVNAPTSNIHSAAEHALALLLAASRQIPAADASLRE | |
| | smegmatis | | HTWKRSSFSGTEIFGKTVGVVGLGRIGQLVAQRIAAFGAYVV | |
| | gene) | | AYDPYVSPARAAQLGIELLSLDDLLARADFISVHLPKTPETA | |
| | | | GLIDKEALAKTKPGVIIVNAARGGLVDEAALADAITGGHVRA | |
| | | | AGLDVFATEPCTDSPLFELAQVVVTPHLGASTAEAQDRAGTD | |
| | | | VAESVRLALAGEFVPDAVNVGGGVVNEEVAPWLDLVRKLGVL | |
| | | | AGVLSDELPVSLSVQVRGELAAEEVEVLRLSALRGLFSAVIE | |
| | | | DAVTFVNAPALAAERGVTAEICKASESPNHRSVVDVRAVGAD | |
| | | | GSVVTVSGTLYGPQLSQKIVQINGRHFDLPAQGINLIIHYVD | |
| | | | RPGALGKIGTLLGTAGVNIQAAQLSEDAEGPGATILLRLDQD | |
| | | | VPDDVRTAIAAAVDAYKLEVVDLS | |
| serA | Mycobacterium | CAB16440 | MDLPVVLIADKLAQSTVAALGDQVEVRWVDGPDRTKLLAAVP | 89 |
| | leprae (use this | | EADALLVRSATTVDAEVLAAAPKLKIVAPAGVGLDNVDVDAA | |
| | to clone M. | | TARGVLVVNAPTSNIHSAAEHALALLLAASRQIAEADASLRA | |
| | smegmatis | | HIWKRSSFSGTEIFGKTVGVVGLGRIGQLVAARIAAFGAHVI | |
| | gene) | | AYDPYVAPARAAQLGIELMSFDDLLARADFISVHLPKTPETA | |
| | | | GLIDKEALAKTKPGVIIVNAARGGLVDEVALADAVRSGHVRA | |
| | | | AGLDVFATEPCTDSPLFELSQVVVTPHLGASTAEAQDRAGTD | |
| | | | VAESVRLALAGEFVPDAVNVDGGVVNEEVAPWLDLVCKLGVL | |
| | | | VAALSDELPASLSVHVRGELASEDVEILRLSALRGLFSTVIE | |
| | | | DAVTFVNAPALAAERGVSAEITTGSESPNHRSVVDVRAVASD | |
| | | | GSVVNIAGTLSGPQLVQKIVQVNGRNFDLRAQGMNLVIRYVD | |
| | | | QPGALGKIGTLLGAAGVNIQAAQLSEDTEGPGATILLRLDQD | |
| | | | VPGDVRSAIVAAVSANKLEVVNLS | |
| serA | Thermobifida | ZP_00057280 | MAATAVEPTRTPSKEFVVPKPVVLVAEELSPAGIALLEEDFE | 90 |
| | fusca | | VRHVNGADRSQLLPALAGVDALIVRSATKVDAEVLAAAPSLK | |
| | | | VVARAGVGLDNVDVEAATKAGVLVVNAPTSNIISAAEQAINL | |
| | | | LLATAPNTAAAHAALVRGEWKRSKYTGVELYDKTVGIVGLGR | |
| | | | IGVLVAQRLQAFGTKLIAYDPFVQPARAAQLGVELVELDELL | |
| | | | ERSDFITIHLPKTKDTIGLIGEEELRKVKPTVRIINAARGGI | |
| | | | VDETALYHALKEGRVAGAGLDVFAKEPCTDSPLFELENVVVA | |
| | | | PHLGASTHEAQEKAGTQVARSVKLALAGEFVPDAVNIQGKGV | |
| | | | SEDIKPGLPLTEKLGRILAALADGAITRVEVEVRGEIVAHDV | |
| | | | KVIELAALKGLFTDIVEEAVTYVNAPLVAKERGIEVSLTTEE | |
| | | | ESPDWRNVITVRAILSDGQRVSVSGTLTGPRQLEKLVEVNGY | |
| | | | TMEIAPSEHMAFFSYHDRPGVVGVVGQLLGQAQVNIAGMQVS | |
| | | | RDKEGGAALIALTVDSAIPDETLETISKEIGAEISRVDLVD | |
| serA | Streptomyces | CAB37591 | MSSKPVVLIAEELSPATVDALGPDFEIRHCNGADRAELLPAI | 91 |
| | coelicolor | | ADVDAILVRSATKVDAEAVAAAKKLKVVARAGVGLDNVDVSA | |
| | | | ATKAGVMVVNAPTSHIVTAAELACGLIVATARNIPQANAALK | |
| | | | NGEWKRSKYTGVELAEKTLGVVGLGRIGALVAQRMSAFGMKV | |
| | | | VAYDPYVQPAPAAQMGVKVLSLDELLEVSDFITVHLPKTPET | |
| | | | LGLIGDEALRKVKPSVRIVNAARGGIVDEEALYSALKEGRVA | |
| | | | GAGLDVYAKEPCTDSPLFEFDQVVATPHLGASTDEAQEKAGI | |
| | | | AVAKSVRLALAGELVPDAVNVQGGVIAEDVKPGLPLAERLGR | |
| | | | IFTALAGEVAVRLDVEVYGEITQHDVKVLELSALKGVFEDVV | |
| | | | DETVSYVNAPLFAQERGVEVRLTTSSESPEHRNVVIVRGTLS | |
| | | | DGEEVSVSGTLAGPKHLQKIVAIGEYDVDLALADHMVVLRYE | |
| | | | DRPGVVGTVGRIIGEAGLNIAGMQVARATVGGEALAVLTVDD | |
| | | | TVPSGVLAEVAAEIGATSARSVNLV | |
| serA | Lactobecilus | CAD63373 | MTKVFIAGQLPAQANTLLLQSQLVIDTYTGDNLISHAELIRR | 92 |
| | plantarum | | VADADFLIIPLSTQVDQDVLDHAPHLKLIANFGAGTNNIDIA | |
| | | | AAAKRQIPVTNTPNVSAVATAESTVGLIISLAHRIVEGDHLM | |
| | | | RTSGFNGWAPLFFLGHNLQGKTLGILGLGQIGQAVAKRLHAF | |
| | | | DMPILYSQHHRLPISRETQLGATFVSQDELLQRADIVTLHLP | |
| | | | LTTQTTHLIDNAAFSKMKSTALLINAARGPIVDEQALVTALQ | |
| | | | QHQIAGAALDVYEHEPQVTPGLATMNNVILTPHLGNATVEAR | |
| | | | DGMATIVAENVIAMAQHQPIKYVVNDVTPA | |
| serA | Coryne- | BAB98677 | MSQNGRPVVLIADKLAQSTVDALGDAVEVRWVDGPNRPELLD | 232 |
| | bacterium | | AVKEADALLVRSATTVDAEVIAAAPNLKIVGRAGVGLDNVDI | |
| | glutamicum | | PAATEAGVMVANAPTSNIHSACEHAISLLLSTARQIPAADAT | |
| | | | LREGEWKRSSFNGVEIFGKTVGIVGFGHIGQLFAQRLAAFET | |
| | | | TIVAYDPYANPAPAAQLNVELVELDELMSRSDFVTIHLPKTK | |
| | | | ETAGMFDAQLLAKSKKGQIIThAARGGLVDEQALADAIESGH | |
| | | | IRGAGFDVYSTEPCTDSPLFKLPQVVVTPHLGASTEEAQDRA | |
| | | | GTDVADSVLKALAGEFVADAVNVSGGRVGEEVAVWMDLARKL | |
| | | | GLLAGKLVDAAPVSIEVEARGELSSEQVDALGLSAVRGLFSG | |
| | | | IIEESVTFVNAPRIAEERGLDISVKThSESVTHRSVLQVKVI | |
| | | | TGSGASATVVGALTGLERVEKITRINGRGLDLRAEGLNLFLQ | |
| | | | YTDAPGALGTVGTKLGAAGINIEAAALTQAEKGDGAVLILRV | |
| | | | ESAVSEELEAEINAELGATSFQVDLD | |
| serA | Escherichia coli | NP_417388 | MAKVSLEKDKIKFLLVEGVHQKALESLRAAGYTNIEFHKGAL | 233 |
| | | | DDEQLKESIRDAHFIGLRSRTHLTEDVINAAEKLVAIGCFCI | |
| | | | GTNQVDLDAAAKRGIPVFNAPFSNTRSVAELVIGELLLLLRG | |
| | | | VPEANAKAHRGVWNKLAAGSFEARGKKIGIIGYGHIGTQLGI | |
| | | | LAESLGMYVYFYDIEMCLPLGNATQVQHLSDLLNMSDVVSLH | |
| | | | VPENPSTKNMMGAKEISLMKPGSLLINASRGTVVDIPALCDA | |
| | | | LASKHLAGAAIDVFPTEPATNSDPFTSPLCEFDNVLLTPHIG | |
| | | | GSTQEAQENIGLEVAGKLIKYSDNGSTLSAVNFPEVSLPLHG | |
| | | | GRRLMHIHENRPGVLTALNKIFAEQGVNIAAQYLQTSAQMGY | |
| | | | VVIDIEADEDVAEKALQANKAIPGTIRARLLY | |
| lysE | Mycobacterium | CAA98398 | MNSPLVVGFLACFTLIAAIGAQNAFVLRQGIQREHVLPVVAL | 93 |
| | tuberculosis (use | | CTVSDIVLIAAGIAGFGALIGAHPRALNVVKFGGAAFLIGYG | |
| | this to clone M. | | LLAARRAWRPVALIPSGATPVRLAEVLVTCAAFTFLNPHVYL | |
| | smegmatis | | DTVVLLGALANEHSDQRWLFGLGAVTASAVWFATLGFGAGRL | |
| | gene) | | RGLFTNPGSWRILDGLIAVMMVALGISLTVT | |
| lysE | Mycobacterium | CAB00949 | MMTLKVAIGPQNAFVLRQGIRREYVLVIVALCGIADGALIAA | 94 |
| | tuberculosis (use | | GVGGFAALIHAHPNMTLVARFGGAAFLIGYALLAARNAWRPS | |
| | this to clone M. | | GLVPSESGPAALIGVVQMCLVVTFLNPHVYLDTVVLIGALAN | |
| | smegmatis | | EESDLRWFFGAGAWAASVVWFAVLGFSAGRLQPFFATPAAWR | |
| | gene | | ILDALVAVTMIGVAVVVLVTSPSVPTANVALII | |
| lysE | Streptomyces | CAB93746 | MNNALTAAAAGFGTGLSLIVAIGAQNAFVLRQGVRRDAVLAV | 95 |
| | coelicolor | | VGICALSDAVLIALGVGGVGAVVVAWPGALTAVGWIGGAFLL | |
| | | | CYGALAARRVFRPSGALRADGAAAGSRRRAVLTCLALTWLNP | |
| | | | HVYLDTVFLLGSVAADRGPLRWTFGLGAAAASLVWFAALGFG | |
| | | | ARYLGRFLSRPVAWRVLDGLVAATMIVLGVSLVAGA | |
| lysE | Lactobacillus | CAD63877 | MQVFLQGLLFGIVYIAPIGMQNLFVVSTAIEQPLQRALRVAL | 96 |
| | plantarum | | IVIAFDTSLSLACFYGVGRLLQTTPWLELGVLLIGSLLVFYI | |
| | | | GWNLLRKKATAMGTLDADFSYKAAILTAFSVAWLNPQALIDG | |
| | | | SVLLAAFRVSIPAALTHFFMLGVILASIIWFIGLTSLISKFK | |
| | | | LMQPRVLLWINRICGGIIILYGVQLLATFITKI | |
| lysE | Coryne- | CAA65324 | MEIFITGLLLGASLLLSIGPQNVLVIKQGIKREGLIAVLLVC | 234 |
| | bacterium | | LISDVFLFIAGTLGVDLLSNAAPIVLDIMRWGGIAYLLWFAV | |
| | glutamicum | | MAAKDAMTNKVEAPQIIEETEPTVPDDTPLGGSAVATDTRNR | |
| | | | VRVEVSVDKQRVWVKPMLMAIVLTWLNPNAYLDAFVFIGGVG | |
| | | | AQYGDTGRWIFAAGAFAASLIWFPLVGFGAAALSRPLSSPKV | |
| | | | WRWINVVVAVVMTALAIKLMLMG | |
| metB | Mycobacterium | CAA17195 | MSEDRTGHQGISGPATRAIHAGYRPDPATGAVNVPIYASSTF | 97 |
| | tuberculosis (use | | AQDGVGGLRGGFEYARTGNPTRAALEASLAAVEEGAFAPAFS | |
| | this to clone M. | | SGMAATDCALRAMLRPGDHVVIPDDAYGGTFRLIDKVFTRWD | |
| | smegmatis | | VQYTPVRLADLDAVGAAITPRTRLIWVETPTNPLLSIADITA | |
| | gene) | | IAELGTDRSAKVLVDNTFASPALQQPLRLGADVVLHSTTKYI | |
| | | | GGHSDVVGGALVTNDEELDEEFAFLQNGAGAVPGPFDAYLTM | |
| | | | RGLKTLVLRMQRHSENACAVAEFLADHPSVSSVLYPGLPSHP | |
| | | | GHEIAARQMRGFGGMVSVRMRAGRRAAQDLCAKTRVFILAES | |
| | | | LGGVESLIEHPSAMTHASTAGSQLEVPDDLVRLSVGIEDIAD | |
| | | | LLGDLEQALG | |
| metB | Mycobacterium | AAA63036 | MSEDYRGHHGITGLATKAIHAGYRPDPATGAVNVPIYASSTF | 98 |
| | leprae (use this | | AQDGVGELRGGFEYARTGNPMRAALEASLATVEEGVFARAFS | |
| | to clone M. | | SGMAASDCALRVMLRPGDHVIIPDDVYGGTFRLIDKVFTQWN | |
| | smegmatis | | VDYTPVPLSDLDAVRAAITSRTRLIWVETPTNPLLSIADITS | |
| | gene) | | IGELGKKHSVKTLVDNTFASPALQQPLMLGALVVLHSTTKYI | |
| | | | GGHSDVVGGALVTNDEELDQAFGFLQNGAGAVPSPFDAYLTM | |
| | | | RGLKTLVLRMQRHNENAITVAEFLAGHPSVSAVLYPGLPSHP | |
| | | | GHEVAARQMRGFGGMVSLRMRAGRLAAQDLCARTKVFTLAES | |
| | | | LGGVESLIEQPSAMTHASTTGSQLEVPDDLVRLSVGIEDVGD | |
| | | | LLCDLKQALN | |
| metB | Streptomyces | CAD30944 | MPMSDRHISQHFETLAIHAGNTADPLTGAVVPPIYQVSTYKQ | 99 |
| | coelicolor | | DGVGGLRGGYEYSRSANPTRTALEENLAALEGGRRGLAFASG | |
| | | | LAAEDCLLRTLLRPGDHVVIPNDAYGGTFRLFAKVATRWGVE | |
| | | | WSVADTSDAAAVRAALTPKTKAVWVETPSNPLLGITDIAQVA | |
| | | | QVARDAGARLVVDNTFATPYLQQPLALGADVVVHSLTKYMGG | |
| | | | HSDVVGGALIVGDQELGEELAFHQNANGAVAGPFDSWLVLRG | |
| | | | TKTLAVRMDRHSENATKVADMLSRHARVTSVLYPGLPEHPGH | |
| | | | EVAAKQMKAFGGMVSFRVEGGEQAAVEVCNRAKVFTLGESLG | |
| | | | GVESLIEHPGRMTHASAAGSALEVPADLVRLSVGIENADDLL | |
| | | | ADLQQALG | |
| metB | Thermobifida | ZP_00059348 | MSYEGFETLAIHAGQEADAETGAVVVPIYQTSTYRQDGVGGL | 100 |
| | fusca | | RGGYEYSRTANPTRTALEECLAALEGGVRGLAFASGMAAEDT | |
| | | | LLRTIARPGDHLIIPNDAYGGTFRLVSKVFERWGVSWDAVDL | |
| | | | SNPEAVRTAIRPETVAIWVETPTNPLLNIADIAALADIAHAA | |
| | | | DALLVVDNTFASPYLQRPLSLGADVVVHSTTKYLGGHSDVVG | |
| | | | GALVVADAELGERLAFHQNSMGAVAGPFDAWLTLRGIKTLGV | |
| | | | RMDRHCANAERVVEALVGHPEVAEVLYPGLSDHPGHKVAVDQ | |
| | | | MRAFGGMVSFRMRGGEEAALRVCAKTKVFTLAESLGGVESLI | |
| | | | EHPGKMTHASTAGSLLEVPSDLVRLSVGIETVDDLVNDLLQA | |
| | | | LEP | |
| metB | Lactobacillus | CAD62912 | MKFETQLIHGGISEDATTGATSVPIYMASTFRQTKIGQNQYE | 101 |
| | plantarum | | YSRTGNPTRAAVEALIATLEHGSAGFAFASGSAAINTVFSLF | |
| | | | SAGDHIIVGNDVYGGTFRLIDAVLKHFGMTFTAVDTRDLAAV | |
| | | | EAAITPTTKAIYLETPTNPLLHITDIAAIAKLAQAHDLLSII | |
| | | | DNTFASPYVQKPLDLGVDIVLHSASKYLGGHSDVIGGLVVTK | |
| | | | TPALGEKIGYLQNAIGSILAPQESWLLQRGMKTLALRMQAHL | |
| | | | NNAAKIFTYLKSHPAVTKIYYPGDPDNPDFSIAKQQMNGFGA | |
| | | | MISFELQPGMNPQTFVEHLQVITLAESLGALESLIEIPALMT | |
| | | | HGAIPRTIRLQNGIKDELIRLSVGVEASDDLLADLERGFASI | |
| | | | QAD | |
| metB | Coryne- | AAD54070 | MSFDPNTQGFSTASIHAGYEPDDYYGSINTPIYASTTFAQNA | 235 |
| | bacterium | | PNELRKGYEYTRVGNPTIVALEQTVAALEGAKYGRAFSSGMA | |
| | glutamicum | | ATDILFRIILKPGDHIVLGNDAYGGTYRLIDTVFTAWGVEYT | |
| | | | VVDTSVVEEVKAAIKDNTKLIWVETPTNPALGITDIEAVAKL | |
| | | | TEGTNAKLVVDNTFASPYLQQPLKLGAHAVLHSTTKYIGGHS | |
| | | | DVVGGLVVTNDQEMDEELLFMQGGIGPIPSVFDAYLTARGLK | |
| | | | TLAVRMDRHCDNAEKIAEFLDSRPEVSTVLYPGLKNHPGHEV | |
| | | | AAKQMKRFGGMISVRFAGGEEAAKKFCTSTKLICLAESLGGV | |
| | | | ESLLEHPATMTHQSAAGSQLEVPRDLVRISIGIEDIEDLLAD | |
| | | | VEQALNNL | |
| metB | Escherichia coli | NP_418374 | MTRKQATIAVRSGLNDDEQYGCVVPPIHLSSTYNFTGFNEPR | 236 |
| | | | AHDYSRRGNPTRDVVQRALAELEGGAGAVLTNTGMSAIHLVT | |
| | | | TVFLKPGDLLVAPHDCYGGSYRLFDSLAKRGCYRVLFVDQGD | |
| | | | EQALRAALAEKPKNVLVESPSNPLLRVVDIAKICHLAREVGA | |
| | | | VSVVDNTFLSPALQNPLALGADLVLHSCTKYLNGHSDVVAGV | |
| | | | VIAKDPDVVTELAWWANNIGVTGGAFDSYLLLRGLRTLVPRM | |
| | | | ELAQRNAQAIVKYLQTQPLVKKLYHPSLPENQGHEIAARQQK | |
| | | | GFGANLSFELDGDEQTLRRFLGGLSLFTLAESLGGVESLISH | |
| | | | AATMTHAGMAPEAPAAAGISETLLRISTGIEDGEDLIADLEN | |
| | | | GFPAANKG | |
| putative | Streptomyces | CAB40862 | MAGIGAFWSVSFLLVLVPGADWAYAITAGLRHRSVLPAVGGM | 102 |
| threonine | coelicolor | | LSGYVLLTAVVAAGLATAVAGSPTVLTALTAAGAAYLIWLGA | |
| efflux | | | TTLARPAAPRAEEGDQGDGSGSLVGRAARGAGISGLNPKALL | |
| protein 1 | | | LFLALLPQFAARDADWPFAAQIVALGLVHTANCAVVYTGVGA | |
| | | | TARRILGARPAVATAVSRFSGAAMILVGALLLVERLLAQGPT | |
| threonine | Coryne- | NP_601855 | MDAASWVAFALALLVANAVPGPDLVLVLHSATRGIRTGVMTA | 196 |
| efflux | bacterium | | AGIMTGLMLHASLAIAGATALLLSAPGVLSAIQLLGAGVLLW | |
| protein | glutamicum | | MGTNMFRASQNTGESETAASQSSAGYFRGFITNATNPKALLF | |
| | | | FAAILPQFIGNGEDMKMRTLANCATIVLGSGAWWLGTIALVR | |
| | | | GIGLQKLPSADRIITLVGGIALFLIGAGLLVNTAYGLIT | |
| hypothetical | Streptomyces | CAB42763 | MSVPGSVAQVTEAEEPKPQSDEARSAFRQPSGIAASIDGESS | 103 |
| protein | coelicolor | | TTSEFEIPQGFAVPRHAGTESETTSEFSLPDGLEVPQAPPAD | |
| NCgl2533 | | | TEGSAFTMPSTHSAWTAPTAFTPASGFPAVSLTDVPWQDRMR | |
| related | | | AMLRMPVAERPAPEPSQKHDDETGPAVPRVLDLTLRIGELLL | |
| | | | AGGEGAEDVEAANFAVCRSYGLDRCEPNVTFTLLSISYQPSL | |
| | | | VEDPVTASRTVRRRGTDYTRLAAVFHLVDDLSDPDTNISLEE | |
| | | | AYRRLAEIRRNRHPYPTWVLTVASGLLAGGASLLVGGGLTVF | |
| | | | FAAMFGSMLGDRLAWLCAGRGLPEFYQFAVAAMPPAAMGVVL | |
| | | | TVTHVDVKASAVITGGLFALLPGRALVAGVQDGLTGFYITAA | |
| | | | ARLLEVMYFFVSIVAGVLVVLYFGVQLGAELHPDAKLGTGDE | |
| | | | PFVQIFASMLLSLAFAILLQQERATVLAVTLNGGIAWCVYGA | |
| | | | MNYAGDISPVASTAAAAGLVGLFGQLMSRYRFASALPYTTAA | |
| | | | IGPLLPGSATYFGLLGIAQGEVDSGLLSLSNAVALAMAIAIG | |
| | | | VNLGGEISRLFLKVPGAASAAGRRAAKRTRGF | |
| hypotheti- | Mycobacterium | AAK48209 | MDQDRSDNTALRRGLRIALRGRRDPLPVAGRRSRTSGGIGDL | 104 |
| cal | tuberculosis (use | | HTRKVLDLTIRLAEVMLSSGSGTADVVATAQDVAQAYQLTDC | |
| protein | this to clone M. | | VVDITVTTIIVSALATTDTPPVTIMRSVRTRSTDYSRLAELD | |
| NCgl2533 | smegmatis | | RLVQRITSGGVAVDQAHEANDELTERPHPYPRWLATAGAAGF | |
| related | gene) | | ALGVAMLLGGTWLTCVLAAVTSGVIDRLGRLLNRIGTPLFFQ | |
| | | | RVFGAGIATLVAVAAYLIAGQDPTALVATGIVVLLSGMTLVG | |
| | | | SMQDAVTGYMLTALARLGDALFLTAGIVVGILISLRGVTNAG | |
| | | | IQIELHVDATTTLATPGMPLPILVAVSGAALSGVCLTIASYA | |
| | | | PLRSVATAGLSAGLAELVLIGLGAAGFGRVVATWTAAIGVGF | |
| | | | LATLISIRRQAPALVTATAGIMPMLPGLAVFRAVFAFAVNDT | |
| | | | PDGGLTQLLEAAATALALGSGVVLGEFLASPLRYGAGRIGDL | |
| | | | FRIEGPPGLRRAVGRVVRLQPAKSQQPTGTGGQRWRSVALEP | |
| | | | TTADDVDAGYRGDWPATCTSATEVR | |
| hypotheti- | Mycobacterium | CAA18059 | MDQDRSDNTALRRGLRIALRGRRDPLPVAGRRSRTSGGIDDL | 105 |
| cal | tuberculosis (use | | HTRKVLDLTIRLAEVMLSSGSGTADVVATAQDVAQAYQLTDC | |
| protein | this to clone M. | | VVDITVTTIIVSALATTDTPPVTIMRSVRTRSTDYSRLAELD | |
| NCgl2533 | smegmatis | | RLVQRITSGGVAVDQAHEAMDELTERPHPYPRWLATAGAAGF | |
| related | gene) | | ALGVAMLLGGTWLTCVLAAVTSGVIDRLGRLLNRIGTPLFFQ | |
| | | | RVFGAGIATLVAVAAYLIAGQDPTALVATGIVVLLSGMTLVG | |
| | | | SMQDAVTGYMLTALARLGDALFLTAGIVVGILISLRGVTNAG | |
| | | | IQIELHVDATTTLATPGMPLPILVAVSGAALSGVCLTIASYA | |
| | | | PLRSVATAGLSAGLAELVLIGLGAAGFGRVVATWTAAIGVGF | |
| | | | LATLISIRRQAPALVTATAGIMPMLPGLAVFRAVFAFAVNDT | |
| | | | PDGGLTQLLEAAATALALGSGVVLGEFLASPLRYGAGRIGDL | |
| | | | FRIEGPPGLRRAVGRVVRLQPAKSQQPTGTGGQRWRSVALEP | |
| | | | TTADDVDAGYRGDWPATCTSATEVR | |
| hypotheti- | Thermobifida | ZP_000595 | MISYGPVADRCRVGATSAAWGTSPPMSFPFLPLVSHPLPYVP | 106 |
| cal | fusca | | GLDASFPDGACVPLGRGPSRGGERRMNQAPRRSDTSHSPTLL | |
| protein | | | TRLRDWRASRGVLDLEAEEFEDEAPRPDPRAMDLVLRVGELL | |
| NCgl2533 | | | LASGEATETVSDAMLSLAVAFELPRSEVSVTFTGITLSCHPG | |
| related | | | GDEPPVTGERVVRRRSLDYHKVNELHALVEDAALGLLDVERA | |
| | | | TARLHAIKRSRPHYPRWVIVAGLGLIASSASVMVGGGIIVAA | |
| | | | TAFAATVLGDRAAGWLARRGVAEFYQMAVAALLAASTGMALL | |
| | | | WVSEELELGLRAMAVITGSIVALLPGRPLVSSLQDGISGAYV | |
| | | | SAAARLLEVFFMLGAIVAGVGAVAYTAVRLGLYVDLDNLPSA | |
| | | | GTSLEPVVLAAAAGLALAFAVSLVAPVRALLPIGANGVLIWV | |
| | | | CYAGLRELLAVPPVVGTGAGAVVVGVIGHWLARRTRRPPLTF | |
| | | | IIPSIAPLLPGSILYRGLIEMSTGEPLAGVASLGEAVAVGLA | |
| | | | LGAGVNLGGELVPAFSWGGLVGAGRRGRQAARRTRGGY | |
| hypotheti- | Lactobacillus | CAD62758 | MNKERKSVMPLSQRHHMTIPWKDFIRNEDVPAKHASLQERTS | 107 |
| cal | plantarum | | IVGRVGILMLSCGTGAWRVRDAMNKIARSLNLTCSADIGLIS | |
| protein | | | IQYTCFHHERSYTQVLSIPNTGVNTDKLNILEQFVKDFDAKY | |
| NCgl2533 | | | ARLTVAQVHAAIDEVQTRPKQYSPLVLGLAAGLACSGFIFLL | |
| related | | | GGGIPEMICSFLGAGLGNYVRALMGKRSMTTVAGIAVSVAVA | |
| | | | CLAYMVSFKIFEYNFQILAQHEAGYIGAMLFVIPGFPFITSM | |
| | | | LDISKLDMRSGLERLAYAIMVTLIATLVGWLVATLVSFKPAL | |
| | | | FLPLGLSPLAVLLLRLPASFCGVYGFSIMFNSSQKMAITAGF | |
| | | | IGAIANTLRLELVDLTAMPPAAAAFCGALVAGLIASVVNRYN | |
| | | | GYPRISLTVPSIVIMVPGLYIYRAIYSIGNNQIGVGSLWLTK | |
| | | | AVLIIMFLPLGLFVAPALLDHEWRHFD | |
| NCgl2533 | Coryne- | NP_601823 | MLSFATLRGRISTVDAAKAAPPPSPLAPIDLTDHSQVAGVMN | 198 |
| | bacterium | | LAARIGDILLSSGTSNSDTKVQVRAVTSAYGLYYTHVDITLN | |
| | glutamicum | | TITIFTNIGVERKMPVNVFHVVGKLDTNFSKLSEVDRLIRSI | |
| | | | QAGATPPEVAEKILDELEQSPASYGFPVALLGWAMMGGAVAV | |
| | | | LLGGGWQVSLIAFITAFTIIATTSFLGKKGLPTFFQNVTGGF | |
| | | | IATLPASIAYSLALQFGLEIKPSQIIASGIVVLLAGLTLVQS | |
| | | | LQDGITGAPVTASARFFETLLFTGGIVAGVGLGIQLSEILHV | |
| | | | MLPAMESAAAPNYSSTFARIIAGGVTAAAFAVGCYAEWSSVI | |
| | | | IAGLTALMGSAFYYLFVVYLGPVSAAAIAATAVGFTGGLLAR | |
| | | | RFLIPPLIVAIAGITPMLPGLAIYRGMYATLNDQTLMGFTNI | |
| | | | AVALATASSLAAGVVLGEWIARRLRRPPRFNPYRAFTKANEF | |
| | | | SFQEEAEQNQRRQRKRPKTNQRFGNKR | |
| putative | Thermobifida | ZP_000569 | MSGGVMADITRNRSSGLAFAIASALAFGGSGPVARPLIDAGL | 108 |
| membrane | fusca | | DPLHVTWLRVAGAALLLLPVAFRHHRTLRTRPALLLAYGVFP | |
| protein | | | MAGVQAFYFAAISRIPVGVALLIEFLGPVLVLLWTRLVRRIP | |
| NCgl0580 | | | VSRAASLGVALAVIGLGCLVEVWAGIRLDAVGLILALAAAVC | |
| related | | | QATYFLLSDTARDDVDPLAVISYGALIATALLSLLARPWTLP | |
| | | | WGILAQNVGFGGLDIPALILLVWLALVATTIAYLTGVAAVRR | |
| | | | LSPVVAGGVAYLEVVTSIVLAWLLLGEALSVAQLVGAAAVVT | |
| | | | GAFLAQTAVPDTSAAQGPETLPTAQDPAPQTGSAR | |
| putative | Thermobifida | ZP_000594 | MNSDSPGQSAPGPFSRAAALVRAAGTAIPATWLVGVSILSVQ | 109 |
| membrane | fusca | | FGAGVAKNLFAVLPPSTVVWLRLLASALVLLCFAPPPLRGHS | |
| protein | | | RTDWLVAVGFGTSLAVMNYAIYESFARIPLGVAVTIEFLGPL | |
| NCgl0580 | | | AVAVAGSRRWRDLVWVVLAGTGVALLGWDDGGVTLAGVAFAA | |
| related | | | LAGAAWACYILLSAATGRRFPGTSGLTVASVIGAVLVAPMGL | |
| | | | AHSSPALLDPSVLLTGLAVGLLSSVIPYSLEMQALRRIPPGV | |
| | | | FGILMSLEPAAAALVGLVLLGEFLTVAQWAAVACVVVASVGA | |
| | | | TRSARL | |
| putative | Thermobifida | ZP_000580 | MWTLDLPLKRNDSSTNGAWTETENRRHSGGMILSFVSLVRHA | 110 |
| membrane | fusca | | HLRVPAPLLTVLSLVLLHMGSAGAVHLFAIAGPLEVTWLRLS | |
| protein | | | WAALLLFAVGGRPLLRAARAATWSDLAATAALGVVSAGMTLL | |
| NCgl0580 | | | FSLALDRIPLGTAAAIEFLGPLTVSVLALRRRRDLLWIVLAV | |
| related | | | AGVLLLTRPWHGEANLLGIAFGLGGAVCVALYIVFSQTVGSR | |
| | | | LGVLPGLTLANTVSALVTAPLGLPGAMAAADRHLVAATLGLA | |
| | | | LIYPLLPLLLEMVSLQRMNRGTFGILVSVDPAIGLLIGLLLI | |
| | | | GQVPVPLQVAGMALVVAAGLGATRGTSGRTRGGADPHATDGE | |
| | | | PEDRTPDRPAPDDAGHHTTDPVTV | |
| putative | Streptomyces | CAB71821 | MAATRPAVIALTALAPVSWGSTYAVTTEFLPPDRPLFTGLMR | 111 |
| membrane | coelicolor | | ALPAGLLLLALARVLPRGAWWGKAAVLGVLNIGAFFPLLFLA | |
| protein | | | AYRMPGGMAAVVGSVGPLLVVGLSALLLGQRPTTRSVLTGVA | |
| NCgl0580 | | | AASGVSLVVLEAAGALDPLGVLAALAATASMSTGTVLAGRWG | |
| related | | | RPEGVGPLALTGWQLTAGGLLLAPLALLVEGAPPALDGPAVG | |
| | | | GYLYLALANTALAYWLWFRGIGRLSATQVTFLGPLSPLTAAV | |
| | | | IGWAALGEALGPVQLAGTALAFGATLVGQTVPSAPRTPPVAA | |
| | | | GAGPFSSASRNGRKDSMDLTGAALRR | |
| putative | Streptomyces | CAB95885 | MPDGAPGGRFGALGPVGLVLAGGISVQFGAALAVSLMPRAGA | 112 |
| membrane | coelicolor | | LGVVTLRLAVAAVVMLLVCRPRLRGHSRADWGTVVVFGIAMA | |
| protein | | | GMNGLFYQAVDRIPLGPAVTLEVLGPLALSVFASRRAMNLVW | |
| NCgl0580 | | | AALALAGVFLLGGGGFDGLDPAGAAFALAAGAMWAAYIVFSA | |
| related | | | RTGRRFPQADGLALAMAVGALLFLPLGIVESGSKLIDPVTLT | |
| | | | LGAGVALLSSVLPYTLELLALRRLPAPTFAILMSLEPAIAAA | |
| | | | AGFLILDQALTATQSAAIALVIAASMGAVRTQVGRRRAKALP | |
| putative | Streptomyces | CAB46802 | MMTTARTSPPAPWHRRPDLLAAGAATVTVVLWASAFVSIRSA | 113 |
| membrane | coelicolor | | GEAYSPGALALGRLLSGVLTLGAIWLLRREGLPPRAAWRGIA | |
| protein | | | ISGLLWFGFYMVVLNWGEQQVDAGTAALVVNVGPILIALLGA | |
| NCgl0580 | | | RLLGDALPPRLLTGMAVSFAGAVTVGLSMSGEGGSSLFGVVL | |
| related | | | CLLAAVAYAGGVVAQKPALAHASALQVTTFGCLVGAVLCLPF | |
| | | | AGQLVHEAAGAPVSATLNMVYLGVFPTALAFTTWAYALARTT | |
| | | | AGRMGATTYAVPALVVLMSWLALGEVPGLLTLAGGALCLAGV | |
| | | | AVSRSRRRPAAVPDRAAPTAEPRREDAGRA | |
| putative | Streptomyces | CAC32287 | MPVHTSDSARGSRGKGIGLGLALASAVAFGGSGVAAKPLIEA | 114 |
| membrane | coelicolor | | GLDPLHVVWLRVAGAALVMLPLAVRHPALPRRRPALVAGYGL | |
| protein | | | FAVAGVQACYFAAISRIPVGVALLVEYLAPALVLGWVRFVQR | |
| NCgl0580 | | | RPVTRAAALGVVLAVGGLACVVEVWSGLGFDALGLLLALGAA | |
| related | | | CCQVGYFVLSDQGSDAGEEAPDPLGVIAYGLLVGAAVLTIVA | |
| | | | RPWSMDWSVLAGSAPMDGTPVAAALLLAWIVLIATVLAYVTG | |
| | | | IVAVRRLSPQVAGVVACLEAVIATVLAWVLLGEHLSAPQVVG | |
| | | | GIVVLAGAFIAQSSTPAKGSADPVARGGPERELSSRGTST | |
| putative | Erwinia | S35974 | MKLKDFAFYAPCVWGTTYFVTTQFLPADKPLLAALIRALPAG | 115 |
| membrane | chrysanthemi | | IILILGKNLPPVGWLWRLFVLGALNIGVFFVMLFFAAYRLPG | |
| protein | | | GVVALVGSLQPLIVILLSFLLLTQPVLKKQMVAAVAGGIGIV | |
| NCgl0580 | | | LLISLPKAPLNPAGLVASALATMSMASGLVLTKKWGRPAGMT | |
| related | | | MLTFTGWQLFCGGLVILPVQMLTEPLPDLVTLTNLAGYLYLA | |
| | | | IPGSLLAYFMWFSGLEANSPVIMSLLGFLSPLVALLLGFLFL | |
| | | | QQGLSGAQLVGVVFIFSALIIVQDISLFSRRKKVKPLEQSDC | |
| | | | AVK | |
| putative | regulatory | AAF74778 | MKLKDFAFYAPCVWGTTYFVTTQFLPADKPLLAALIRALPAG | 116 |
| membrane | protein PecM | | IILILGKTLPPVGWLWRLFVLGALNIGVFFVMLFFAAYRLPG | |
| protein | [Pecto-bacterium | | GVVALVGSLQPLIVILLSFLLLTQPVLKKQMVAAVAGGIGIA | |
| NCgl0580 | chrysanthemi] | | LLISLPKAPLNPAGLVASALATVSMASGLVLTKKWGRPAGMT | |
| related | | | MLTFTGWQLFCGGLVILPVQMLTEPLPDVVTLTNLAGYFYLA | |
| | | | IPGSLLAYFMWFSGIEANSPVMMSMLGFLSPLVALFLGFLFL | |
| | | | QQGLSGAQLVGVVFIFSAIIIVQDVSLFSRRKKVKQLEQSDC | |
| | | | AVK | |
| putative | Lactobacillus | CA063826 | MKRLVGTLCGIISAALFGLGGILAQPLLSEQVLTPQQIVLLR | 117 |
| membrane | plantarum | | LLIGGAMLLLYRNLFFKQARKSTKKIWTHWRILTRIMIYGIA | |
| protein | | | GLCTAQIAFFSAINYSNAAVATVFQSTSPFILLVFTALKAKR | |
| NCgl0580 | | | LPSLLAGMSLISALMGIWLIVESGFKTGLIKPEAIIFGLIAA | |
| related | | | IGVILYTKLPVPLLNQIAAVDILGWALVIGGVIALIHTPLPN | |
| | | | LVRFSKTQLLAVLIIVILATVVAYDLYLESLKLIDGFLATMT | |
| | | | GLFEPISSVLFGMLFLHQILVPQALVGIILNVGAIMILNLPH | |
| | | | HITAPVPSKTCQCTMSNQ | |
| putative | Lactobacillus | CAD62768 | MKKIAPLFVGLGAISFGIPASLFKIARRQGVVNGPLLFWSFL | 118 |
| membrane | plantarum | | SAVVILGVIQILRPARLRNQQTNWKQIGLVIAAGTASGFTNT | |
| protein | | | FYIQALKLIPVAVAAVMLMQAVWISTLLGAVIHHRRPSRLQV | |
| NCgl0580 | | | VSIVLVLIGTILAAGLFPITQALSPWGLMLSFLAACSYACTM | |
| related | | | QFTASLGNNLDPLSKTWLLCLGAFILIAIVWSPQLVTAPTTP | |
| | | | ATVGWGVLIALFSMVFPLVMYSLFMPYLELGIGPILSSLELP | |
| | | | ASIVVAFVLLDETIDWVQMVGVAIIITAVILPNVLNMRRVRP | |
| putative | Lactobacillus | CAD65468 | MTTNRYMKGIMWAMLASTLWGVSGTVMQFVSQNQAIPADWFL | 119 |
| membrane | plantarum | | SVRTLSAGIILLAIGFVQQGTKIFKVFRSWASVGQLVAYATV | |
| protein | | | GLMANMYTFYISIERGTAAAATILQYLSPLFIVLGTLLFKRE | |
| NCgl0580 | | | LPLRTDLIAFAVSLLGVFLAITKGNIHELAIPMDALVWGILS | |
| related | | | GVTAALYVVLPRKIVAENSPVVILGWGTLIAGILFNLYHPIW | |
| | | | IGAPKITPTLVTSIGAIVLIGTIFAFLSLLHSLQYAPSAVVS | |
| | | | IVDAVQPVVTFVLSIIFLGLQVTWVEILGSLLVIVAIYILQQ | |
| | | | YRSDPASD | |
| NCgl0580 | Coryne- | NP_599841 | MNKQSAAVLMVMGSALSLQFGAAIGTQLFPLNGPWAVTSLRL | 201 |
| | bacterium | | FIAGLIMCLVIRPRLRSWTKKQWIAVLLLGLSLGGMNSLFYA | |
| | glutamicum | | SIELIPLGTAVTIEFLGPLIFSAVLARTLKNGLCVALAFLGM | |
| | | | ALLGIDSLSGETLDPLGVIFAAVAGIFWVCYILASKKIGQLI | |
| | | | PGTSGLAVALITGAVAVFPLGATHMGPIFQTPTLLILALGTA | |
| | | | LLGSLIPYSLELSALRRLPAPIFSILLSLEPAFAAAVGWILL | |
| | | | DQTPTALKWAAIILVIAASIGVTWEPKKMLVDAPLHSKCNAK | |
| | | | RRVHTPS | |
| drug | Streptomyces | CAC32286 | MSNAVSGLPVGRGLLYLIVAGVAWGTAGAAASLVYPASDLGP | 120 |
| permease | coelicolor | | VALSFWRCANGLVLLLAVRPLRPRLRPRLRPRLRPAVREPFA | |
| NCgl2065 | | | RRTLRAGVTGVGLAVFQTAYFAAVQSTGLAVATVVTLGAGPV | |
| related | | | LIALGARLALGEQLGAGGAAAVAGALAGLLVLVLGGGSATVR | |
| | | | LPGVLLALLSAAGYSVMTLLTRWWGRGGGADAAGTSVGAFAV | |
| | | | TSLCLLPFALAEGLVPHTAEPVRLLWLLAYVAAVPTALAYGL | |
| | | | YFAGAAVVRSATVSVIMLLEPVSAAALAVLLLGEHLTAATLA | |
| | | | GTLLMLGSVAGLAVAETRAAREARTRPAPA | |
| drug | Streptomyces | CAA19979 | MNVLLSAAFVLCWSSGFIGAKLGAQTAATPTLLMWRFLPLAV | 121 |
| permease | coelicolor | | ALVAAAAVSRAAWRGLTPRDAGRQTAIGALSQSGYLLSVYYA | |
| NCgl2065 | | | IELGVSSGTTALIDGVQPLVAGALAGPLLRQYVSRGQWLGLW | |
| related | | | LGLSGVATVTVADAGAAGAEVAWWAYLVPFLGMLSLVAATFL | |
| | | | EGRTRVPVAPRVALTIHCATSAVLFSGLALGLGAAAPPAGSS | |
| | | | FWLATAWLVVLPTFGGYGLYWLILRRSGITEVNTLMFLMAPV | |
| | | | TAVWGALMFGEPFGVQTALGLAVGLAAVVVVRRGGGARRERP | |
| | | | VRSGADRPAAGGPTADQPTNRPTDRPTAAGSTDRPTADRR | |
| drug | Thermobifida | ZP_000581 | MSDFRKGVLYGASSYFMWGFLPLYWPLLTPPATAFEVLLHRM | 122 |
| permease | fusca | | IWSLVVTLVVLLVQRNWQWIRGVLRSPRRLLLLLASAALISL | |
| NCgl2065 | | | NWGAFITAVTTGHTLQSALAYFINPLVSVALGLLVFKERLRP | |
| related | | | GQWAALLLGVLAVAVLTVDYGSLPWLALAMAFSFAVYGALKK | |
| | | | FVGLDGVESLSAETAVLFLPALGGAVYLEVTGTGTFTSVSPL | |
| | | | HALLLVGAGVVTAAPLMLFGAAAHRIPLTLVGLLQFMVPVMH | |
| | | | FLIAWLVFGEDLSLGRWIGFAVVWTALVVFVVDMLRHARHTP | |
| | | | RPAPSAPVAEEAEETAAS | |
| drug | Streptomyces | CAC08293 | MAGSSRSDQRVGLLNGFAAYGMWGLVPLFWPLLKPAGAGETL | 123 |
| permease | coelicolor | | AHRMVWSLAFVAVALLFVRRWAWAGELLRQPRRLALVAVAAA | |
| NCgl2065 | | | VITVNWGVYIWAVNSGHVVEASLGYFINPLVTIAMGVLLLKE | |
| related | | | RLRPAQWAAVGTGFAAVLVLAVGYGQPPWISLCLAFSFATYG | |
| | | | LVKKKVNLGGVESLAAETAIQFLPALGYLLWLGAQGESTFTT | |
| | | | EGAGHSALLAATGVVTAIPLVCFGAAAIRVPLSTLGLLQYLA | |
| | | | PVFQFLLGVLYFGEAMPPERWAGFGLVWLALTLLTWDALRTA | |
| | | | RRTAPALREQLDRSGAGVPPLKGAAAAREPRVVASGTPAPGA | |
| | | | GDAPQQQQQQQQQQQQQQHGTRAGKP | |
| drug | Lactobacillus | CAD63209 | MKKAYLYIAISTLMFSSMEIALKMAGSAFNPIQLNLIRFFIG | 124 |
| permease | plantarum | | AIVLLPFALRALKQTGRKLVSADWRLFALTGLVCVIVSMSLY | |
| NCg12065 | | | QLAITVDQASTVAVLFSCNPVFALLFSYLILRERLGRANLIS | |
| related | | | VVISVIGLLIIVNPAHLTNGLGLLLAIGSAVTFGLYSIISRY | |
| | | | GSVKRGLNGLTMTCFTFFAGAFELLVLAWITKIPAVANGLTA | |
| | | | IGLRQFAAIPVLVNVNLNYFWLLFFIGVCVTGGGFAFYFLAM | |
| | | | EQTDVSTASLVFFIKPGLAPILAALILHEQILWTTVVGIVVT | |
| | | | LIGSVVTFVGNRFRERDTMGAIEQPTAAATDDEHVIKAAHAV | |
| | | | SNQEN | |
| NCgl2065 | Coryne- | NP_601347 | MNDAGLKTRNPVLAPILMVVNGVSLYAGAALAVGLFESFPPA | 199 |
| | bacterium | | LVAWMRVAAAAVILLVLYRPAVRNFIGQTGFYAAVYGVSTLA | |
| | glutamicum | | MNITFYEAIARIPMGTAVAIEFLGPIAVAALGSKTLRDWAAL | |
| | | | VLAGIGVIIISGAQWSANSVGVMFALAAALLWAAYIIAGNRI | |
| | | | AGDASSSRTGMAVGFTWASVLSLPLAIWWWPGLGATELTLIE | |
| | | | VIGLALGLGVLSAVIPYGLDQIVLRMAGRSYFALLLAILPIS | |
| | | | AALMGALALGQMLSVAELVGIVLVVIAVALRRPS | |
| predicted | 19553330 | NP_601332.1 | MIFGVLAYLGWGMFPAFFPLLLPAGPFEILAHRILWTAVLMM | 200 |
| permease | | | IIISFTSGWKELKSADRGTWLRIILSSLFIAGNWLIYVIAVN | |
| | | | SGQVTEAALGYFINPLLSVVLGIVFFKEQLRKLQISAVVIAA | |
| | | | AGVLVLTFLGDKPPYLAITLAFTFGIYGALKKQVKMSAASSL | |
| | | | CAETLVLLPIAVIYLIGLEASGHSTFFNNGSGHMALLICSGL | |
| | | | VTAVPLLMFALAAKAIPLSTVGMLQYLTPTMQMLWALFVVNE | |
| | | | SVEPMRWFGFVFIWIAVTIYITDSLLKK | |
| hypotheti- | Thermobifida | P_000582 | MNADTLLWSLLLGVIVVAAAAAIIIPTVRNSSTAPPPGAVGT | 125 |
| cal | fusca | | ALGAALTAAALGIAGSGTAPASEVPAGSGQVRTVDVVLGDMT | |
| membrane | | | VSPSHVTVAPGDSLVLRVRNEDTQVHDLVVETGARTPRLAPG | |
| protein | | | DSATLQVGTVTEPIDAWCTVLGHSAAGMRMRIDTTDTADSAD | |
| NCgl2829 | | | SPDTPAGADSGPPAPLPLSAEMSDDWQPRDAVLPPAPDRTEH | |
| related | | | EVEIRVTETELEVAPGVRQSVWTFGGDVPGPVLRGKVGDVFT | |
| | | | VTFVNDGTMGHGIDFHASSLAPDEPMRTINPGERLTYRFRAE | |
| | | | KAGAWVYHCSTSPMLQHIGNGMYGAVIIDPPDLEPVDREYLL | |
| | | | VQGELYLGEPGSADQVARMRAGEPDAWVFNGVAAGYAHAPLT | |
| | | | AEVGERVRIWVVAAGPTSGTSFHIVGAQFDTVYKEGAYLVRR | |
| | | | GDAGGAQALDLAVAQGGFVETVFPEAGSYPFVDHDMRHAENG | |
| | | | ARGFFTITE | |
| NCgl2829 | Coryne- | NP_602117 | MVLVIAGIIHPLLPEYRWVLIHLFTLGAITNSIVVWSQHFTE | 197 |
| | bacterium | | KFLHLKLEESKRPAQLLKIRVLNVGIIVTIIGQMIGQWIVTS | |
| | glutamicum | | VGATIVGGALAWHAGSLASQFRSAKRGQPFASAVIAYVASAC | |
| | | | CLPFGAFAGALLSKELSGHLQERVLLTHTVINFLGFVGFAAL | |
| | | | GSLSVLFAAIWRTKIRHNFTPWSVGIMAVSLPIIVTGILLNN | |
| | | | GYVAATGLAAYVAAWLLAMVGWGKASISNLSFSTSTSTTAPL | |
| | | | WLVGTLVWLAVQAVMHDGELYHVEVPTIALVIGFGAQLLIGV | |
| | | | MSYLLPSTMGGGASAVRTGTHILNTAGLFRWTLINGGLAIWL | |
| | | | LTDNSWLRVVVSLLSIGALAVFVILLPKAVRAQRGVITKKRE | |
| | | | PITPPEEPRLNQITAGISVLALILAAFGGLNPGVAPVASSNE | |
| | | | DVYAVTITAGDMVFIPDVIEVPAGKSLEVTMLNEDDMVHDLK | |
| | | | FANGVQTGRVAPGDEITVTVGDISEDMDGWCTIAGHRAQGMD | |
| | | | LEVKVAAPN | |
| yggA | Escherichia coli | AAA69090 | MFSYYFQGLALGAAMILPLGPQNAFVMNQGIRRQYHIMIALL | 237 |
| | | | CAISDLVLICAGIFGGSALLMQSPWLLALVTWGGVAFLLWYG | |
| | | | FGAFKTANSSNIELASAEVMKQGRWKIIATMLAVTWLNPHVY | |
| | | | LDTFVVLGSLGGQLDVEPKRWFALGTISASFLWFFGLALLAA | |
| | | | WLAPRLRTAKAQRIThLVVGCVMWFIALQLARDGIAHAQ | |
| | | | ALFS | |
| McbR | C. glutamicum | | MAASASGKSKTSAGANRRRNRPSPRQRLLDSATNLFTTEGIR | 363 |
| | | | VIGIDRILREADVAKASLYSLFGSKDALVIAYLENLDQLWRE | |
| | | | AWRERTVGMKDPEDKIIAFFDQCIEEEPEKDFRGSHFQNAAS | |
| | | | EYPRPETDSEKGIVAAVLEHREWCHKTLTDLLTEKNGYPGTT | |
| | | | QANQLLVFLDGGLAGSRLVHNISPLETARDLARQLLSAPPAD | |
| | | | YSI | |
| ThrB | C. glutamicum | NP_600410.1 | MAIELNVGRKVTVTVPGSSANLGPGFDTLGLALSVYDTVEVE | 364 |
| | | | IIPSGLEVEVFGEGQGEVPLDGSHLVVKAIRAGLKAADAEVP | |
| | | | GLRVVCHNNIPQSRGLGSSAAAAVAGVAAANGLADFPLTQEQ | |
| | | | IVQLSSAFEGHPDNAAASVLGGAVVSWTNLSIDGKSQPQYAA | |
| | | | VPLEVQDNIRATALVPNFHASTEAVRRVLPTEVTHIDARFNV | |
| | | | SRVAVMIVALQQRPDLLWEGTRDRLHQPYRAEVLPITSEW | |
| | | | VNRLRNRGYAAYLSGAGPTAMVLSTEPIPDKVLEDARESGIK | |
| | | | VLELEVAGPVKVEVNQP | |

[0445] TABLE 17

Nucleotide sequences of exemplary heterologous proteins for amino acid production in
Escherichia coli and coryneform bacteria. Note: This table provides coding sequences of each
gene. Some GenBank ® entries contain additional non-coding sequence associated with the gene.

| | | | | |
|---|---|---|---|---|
| | | GenBank ® | | SEQ ID |
| Gene | Organism | Nucleotide ID | NUCLEOTIDE SEQUENCE (CODING) | NO: |

| | | | | | |
|---|---|---|---|---|---|
| lysC | Mycobacterium | Z17372 | GTGGCGCTCGTCGTACAGAAATACGGCGGATCCTCGGT | 11 | |
| | smegmatis | | GGCGGACGCCGAGAGGATCCGACGGGTCGCCGAGCGGA | | |
| | | | TCGTCGAGACCAAGAAGGCGGGCAACGACGTCGTCGTC | | |
| | | | GTCGTCTCCGCGATGGGTGACACCACCGATGACCTGCT | | |
| | | | GGACCTGGCGCGCCAGGTGTCGCCCGCGCCGCCGCCGC | | |
| | | | GCGAGATGGACATGCTGCTGACCGCCGGTGAGCGGATC | | |
| | | | TCCAACGCGCTGGTCGCGATGGCCATCGAATCGCTCGG | | |
| | | | CGCGCAGGCCCGGTCCTTCACCGGATCGCAGGCCGGTG | | |
| | | | TGATCACCACGGGCACGCACGGCAACGCCAAGATCATC | | |
| | | | GACGTCACCCCGGGCCGGTTGCGCGACGCGCTCGACGA | | |
| | | | GGGGCAGATCGTGCTGGTCGCCGGGTTCCAGGGCGTCA | | |
| | | | GCCAGGACAGCAAGGACGTCACCACGCTGGGACGCGGC | | |
| | | | GGTTCGGACACCACGGCCGTCGCCGTGGCTGCGGCACT | | |
| | | | CGATGCCGATGTCTGCGAGATCTACACCGACGTCGACG | | |
| | | | GCATCTTCACCGCGGACCCGCGCATCGTGCCCAACGCC | | |
| | | | CGCCACCTCGACACCGTCTCCTTCGAGGAGATGCTGGA | | |
| | | | GATGGCGGCCTGCGGCGCGAAAGTTCTGATGCTGCGCT | | |
| | | | GCGTCGAGTACGCCCGCCGCTACAACGTGCCCATCCAC | | |
| | | | GTCCGGTCGTCGTATTCGGACAAGCCCGGCACCATCGT | | |
| | | | CAAAGGATCGATCGAGGACATCCCCATGGAAGACGCCA | | |
| | | | TCCTGACCGGAGTAGCCCACGACCGCAGCGAGGCCAAG | | |
| | | | GTCACGGTGGTCGGTCTGCCCGACGTTCCCGGCTACGC | | |
| | | | CGCCAAGGTGTTCCGCGCGGTCGCCGAGGCCGACGTGA | | |
| | | | ACATCGACATGGTGCTGCAGAACATCTCGAAGATCGAG | | |
| | | | GACGGCAAGACCGACATCACGTTCACGTGTGCGCGTGA | | |
| | | | CAACGGCCCGCGGGCCGTAGAGAAGCTCTCGGCGCTCA | | |
| | | | AGAGCGAGATCGGTTTCAGCCAGGTGCTGTACGACGAC | | |
| | | | CACATCGGCAAGGTGTCGCTGATCGGCGCCGGTATGCG | | |
| | | | GTCGCATCCGGGCGTGACGGCCACGTTCTGCGAGGCGC | | |
| | | | TCGCGGAGGCCGGCATCAACATCGACCTGATCTCGACG | | |
| | | | TCGGAGATCCGTATCTCGGTGCTCATCAAGGACACCGA | | |
| | | | ACTGGACAAGGCGGTTTCGGCGCTGCACGAGGCGTTCG | | |
| | | | GCCTCGGCGGCGACGACGAAGCCGTGGTGTACGCGGGA | | |
| | | | ACGGGGCGCTGA | | |
| lysC | Amycolatopsis | AF134837 | GTGGCCCTCGTGGTCCAGAAGTACGGCGGATCGTCGCT | 31 | |
| | mediterranei | | GGAAAGTGCCGACCGGATCAAGCGCGTGGCGGAGCGGA | | |
| | | | TCGTCGCGACGAAGAAGGCGGGCAACGACGTCGTCGTC | | |
| | | | GTCTGCTCGGCGATGGGTGACACCACCGACGAGCTGCT | | |
| | | | CGACCTGGCGCAGCAGGTCAACCCGGCGCCGCCGGAGC | | |
| | | | GGGAGATGGACATGCTGCTCACCGCCGGTGAGCGCATC | | |
| | | | TCGAACTCGCTGGTCGCGATGGCGATCGCGGCCCAGGG | | |
| | | | CGCCGAGGCGTGGTCGTTCACCGGTTCGCAGGCCGGCG | | |
| | | | TCGTCACGACGTCGGTGCACGGCAACGCGCGCATCATC | | |
| | | | GACGTCACGCCGAGCCGGGTCACCGAGGCGCTCGACCA | | |
| | | | GGGGTACATCGCGCTGGTGGCGGGCTTCCAGGGCGTCG | | |
| | | | CGCAGGACACCAAGGACATCACCACGCTGGGCCGCGGC | | |
| | | | GGCTCGGACACCACCGCCGTCGCGCTGGCCGCCGCGCT | | |
| | | | GAACGCCGACGTCTGCGAGATCTACTCCGATGTGGACG | | |
| | | | GTGTGTACACGGCGGACCCGCGGGTGGTGCCGGACGCG | | |
| | | | AAGAAGCTCGACACCGTCACGTACGAAGAGATGCTCGA | | |
| | | | GCTCGCCGCGAGCGGGTCGAAGATCCTGCACCTGCGTT | | |
| | | | CGGTCGAGTACGCGCGCCGCTACGGCGTCCCGATCCGA | | |
| | | | GTCCGTTCTTCCTACAGCGACAAGCCGGGCACGACGGT | | |
| | | | GACCGGTTCTATCGAGGAGATCCCCGTGGAACAAGCCC | | |
| | | | TGATCACCGGTGTGGCGCACGACCGCTCCGAAGCCAAG | | |
| | | | ATCACGGTCACCGGGGTGCCGGACCACACCGGCGCCGC | | |
| | | | GGCCCGGATCTTCCGCGTGATCGCCGACGCCGAGATCG | | |
| | | | ACATCGACATGGTGCTGCAGAACGTGTCCAGCACCGTC | | |
| | | | TCCGGCCGCACGGACATCACGTTCACGCTGTCGAAGGC | | |
| | | | CAACGGCGCCAAGGCCGTCAAGGAACTGGAGAAGGTCC | | |
| | | | AGGCGGAGATCGGCTTCGAGTCGGTCCTCTACGACGAC | | |
| | | | CACGTCGGCAAGGTGTCGGTGGTCGGCGCCGGGATGCG | | |
| | | | CTCGCACCCGGGTGTCACGGCGACGTTCTGCGAAGCGC | | |
| | | | TGGCCGAGGCCGGCGTCAACATCGAAATCATCAACACC | | |
| | | | TCGGAGATCCGCATTTCGGTGCTGATCCGCGACGCGCA | | |
| | | | GCTCGACGACGCCGTGCGCGCGATCCACGAGGCATTCG | | |
| | | | AACTCGGCGGCGACGAAGAAGCCGTCGTCTACGCGGGG | | |
| | | | AGTGGTCGCTGA | | |
| lysC | Streptomyces | AL939117.1 | GTGGGCCTTGTCGTGCAGAAGTACGGAGGCTCCTCCGT | 32 | |
| | coelicolor | | AGCCGATGCCGAGGGCATCAAGCGCGTCGCCAAGCGGA | | |
| | | | TCGTGGAAGCGAAGAAGAACGGCAACCAGGTGGTCGCC | | |
| | | | GTCGTTTCCGCGATGGGCGACACGACGGACGAGCTGAT | | |
| | | | CGATCTCGCCGAGCAGGTTTCCCCGATCCCTGCCGGGC | | |
| | | | GTGAACTCGACATGCTGCTGACCGCCGGGGAGCGTATC | | |
| | | | TCCATGGCGCTGCTGGCCATGGCGATCAAAAACCTGGG | | |
| | | | CCACGAGGCCCAGTCGTTCACCGGCAGCCAGGCCGGAG | | |
| | | | TCATCACCGACTCGGTCCACAACAAGGCCCGGATCATC | | |
| | | | GACGTCACACCGGGTCGCATCCGCACCTCGGTCGACGA | | |
| | | | GGGCAACGTGGCCATCGTGGCCGGCTTCCAGGGCGTCA | | |
| | | | GCCAGGACAGCAAGGACATCACCACGCTGGGCCGCGGC | | |
| | | | GGGTCCGACACCACGGCCGTCGCCCTCGCCGCCGCGCT | | |
| | | | CGACGCGGACGTCTGCGAGATCTACACCGACGTCGACG | | |
| | | | GCGTGTTCACCGCCGACCCGCGCGTGGTGCCGAAGGCG | | |
| | | | AAGAAGATCGACTGGATCTCCTTCGAGGACATGCTGGA | | |
| | | | GCTCGCTGCCTCCGGCTCCAAGGTGCTGCTCCACCGTT | | |
| | | | GCGTGGAGTACGCCCGCCGGTACAACATCCCGATTCAC | | |
| | | | GTGCGGTCCAGCTTCAGCGGACTCCAGGGCACGTGGGT | | |
| | | | CAGCAGCGAGCCGATCAAGCAAGGGGAAAAGCACGTGG | | |
| | | | AGCAGGCCCTCATCTCCGGAGTCGCGCACGACACCTCC | | |
| | | | GAGGCCAAGGTCACGGTCGTCGGGGTGCCCGACAAGCC | | |
| | | | GGGCGAGGCGGCCGCGATCTTCCGCGCCATCGCCGACG | | |
| | | | CCCAGGTCAACATCGACATGGTCGTGCAGAACGTGTCC | | |
| | | | GCCGCCTCCACGGGCCTGACGGACATCTCGTTCACGCT | | |
| | | | CCCCAAGAGCGAGGGCCGCAAGGCCATCGACGCGCTGG | | |
| | | | AGAAGAACCGCCCGGGCATCGGCTTCGACTCGCTGCGC | | |
| | | | TACGACGACCAGATCGGCAAGATCTCGCTGGTCGGCGC | | |
| | | | CGGTATGAAGAGCAATCCGGGCGTCACCGCCGACTTCT | | |
| | | | TCACCGCGCTCTCCGACGCCGGGGTGAACATCGAGCTG | | |
| | | | ATCTCGACCTCCGAGATCCGCATCTCGGTCGTCACCCG | | |
| | | | CAAGGACGACGTGAACGAGGCCGTGCGCGCCGTGCACA | | |
| | | | CCGCCTTCGGGCTCGACTCCGACAGTGACGAGGCCGTG | | |
| | | | GTCTACGGGGGCACCGGGCGCTGA | | |
| lysC | Thermobifida | NZ_AAAQ010 | GTGAATCTCCGATCACTAGACTGGCTGGTCGATTACCG | 33 | |
| | fusca | 00023.1 | TGAACCCGATTCCTCAGGAGCGCCGACCGTGGCTTTGA | | |
| | | | TCGTGCAAAAGTACGGCGGGTCGTCCGTCGCTGATGCG | | |
| | | | GATGCCATTAAGCGGGTAGCCGAACGGATCGTCGCTCA | | |
| | | | GAAGAAAGCCGGATACGACGTGGTCGTCGTGGTCTCCG | | |
| | | | CCATGGGCGACACCACTGACGAGCTTCTCGACCTTGCG | | |
| | | | AAGCAGGTGAGTCCGCTCCCGCCGGGCCGGGAGTTGGA | | |
| | | | CATGCTGCTGACTGCCGGGGAGCGGATCTCGATGGCCC | | |
| | | | TGGTTGCGATGGCTATCGGGAACTTGGGCTATGAGGCC | | |
| | | | CGGTCGTTCACCGGTTCGCAGGCCGGGGTGATCACCAC | | |
| | | | GTCGCTGCACGGCAACGCGAAGATCATCGATGTCACCC | | |
| | | | CGGGGCGGATCAGGGATGCGCTCGCCGAAGGGGCGATC | | |
| | | | TGCATCGTCGCTGGCTTCCAAGGGGTGTCGCAGGACAG | | |
| | | | CAAGGACATCACCACGTTGGGCCGCGGTGGTTCGGACA | | |
| | | | CTACGGCTGTGGCGCTTGCTGCGGCGCTCAACGCCGAC | | |
| | | | TTGTGCGAGATCTACACCGACGTCGACGGGGTGTTCAC | | |
| | | | TGCTGATCCGCGTATCGTGCCCTCCGCTCGACGCATCC | | |
| | | | CCCAGATCTCCTACGAGGAGATGCTGGAGATGGCGGCC | | |
| | | | TCCGGCGCCAAGATCCTGCATCTGCGCTGCGTGGAGTA | | |
| | | | TGCGCGGCGGTACAACATTCCGCTGCACGTGCGCTCGT | | |
| | | | CTTTCAGTCAGAAGCCCGGTACCTGGGTCGTCTCGGAA | | |
| | | | GTTGAGGAAACCGAAGGCATGGAACAACCGATCATCTC | | |
| | | | CGGCGTGGCGCATGACCGGAGCGAAGCCAAGATCACGG | | |
| | | | TTGTGGGGGTGCCCGACCGTGTCGGCGAGGCAGCAGCG | | |
| | | | ATCTTCAAGGCGCTGGCCGACGCTGAGATCAACGTGGA | | |
| | | | CATGATCGTGCAGAACGTGTCCGCGGCTTCCACGTCGC | | |
| | | | GTACGGACATTTCTTTCACTCTGCCTGCCGACTCGGGG | | |
| | | | CAGAACGCGCTGGCCGCGTTGAAGAAGATCCAGGACAA | | |
| | | | GGTCGGTTTCGAGTCGCTGCTGTACAACGACCGGATCG | | |
| | | | GCAAGGTGTCGCTGATCGGCGCGGGGATGCGCTCCTAT | | |
| | | | CCGGGGGTGACTGCTCGGTTCTTTGACGCTGTGGCCCG | | |
| | | | CGAGGGCATCAACATCGAGATGATTTCCACTTCCGAGA | | |
| | | | TCCGCATCTCGATCGTGGTGGCGCAGGACGACGTGGAC | | |
| | | | GCCGCAGTGGCCGCCGCGCACCGTGAGTTCCAGTTGGA | | |
| | | | CGCCGACCAGGTCGAGGCCGTTGTGTATGGAGGTACCG | | |
| | | | GCCGATGA | | |
| lysC | Erwinia | | ATGTCTGCTAACACTGATAACTCACTGATTATCGCCAA | 34 | |
| | chrysanthemi | | ATTCGGCGGCACCAGCGTCGCTGATTTCGACGCCATGA | | |
| | | | ACCGCAGCGCCGACATCGTGCTGTCCGACGCGCAGGTA | | |
| | | | CGGGTGGTGGTGCTGTCCGCCTCCGCCGGCGTGACCAA | | |
| | | | CCTGCTGGTGGCGCTGGCGGAAGGTTTACCGCCATCTG | | |
| | | | AACGCACCGCGCAACTGGAAAAACTGCGCCAGATTCAA | | |
| | | | TACGCCATCATCGACCGCCTCAACCAGCCGGCCGTCAT | | |
| | | | CCGTGAAGAAATCGACCGCATGCTGGACAACGTGGCCC | | |
| | | | GCCTGTCGGAAGCGGCGGCGCTGGCGACTTCCAACGCC | | |
| | | | CTGACCGACGAACTGGTCAGCCACGGCGAGCTGATATC | | |
| | | | CACCTTGCTGTTTGTGGAAATTCTGCGCGAGCGCAACG | | |
| | | | TCGCCGCCGAATGGTTCGACGTGCGTAAAATCATGCGT | | |
| | | | ACCAACGACCGCTTCGGCCGCGCCGAGCCGGACTGCGA | | |
| | | | CGCGCTGGGCGAACTGACCCGCAGCCAGCTGACGCCGC | | |
| | | | GTCTGGCGCAGGGGCTGATCATCACCCAGGGCTTCATC | | |
| | | | GGCAGCGAAGCTAAAGGCCGCACCACCACGCTGGGCCG | | |
| | | | CGGCGGCAGCGATTACACCGCCGCTCTGCTGGGCGAAG | | |
| | | | CGCTGCACGCCAGCCGTATCGACATCTGGACCGACGTT | | |
| | | | CCCGGCATCTACACCACCGACCCGCGCGTGGTGCCGTC | | |
| | | | CGCCCACCGCATCGACCAGATTACCTTTGAAGAAGCGG | | |
| | | | CCGAAATGGCCACCTTCGGCGCCAAGGTGCTGCACCCG | | |
| | | | GCCACACTGCTGCCTGCCGTACGCAGCGACATTCCGGT | | |
| | | | ATTCGTCGGCTCCAGCAAAGACCCGGCGGCCGGCGGCA | | |
| | | | CGCTGGTGTGCAACAACACCGAAAACCCGCCGCTGTTC | | |
| | | | CGCGCGCTGGCGCTGCGCCGCAAGCAGACGCTGCTGAC | | |
| | | | CCTGCATAGCCTTAACATGCTGCACGCGCGCGGCTTTC | | |
| | | | TGGCGGAAGTGTTCAGTATTCTGGCTCGCCACAACATC | | |
| | | | TCGGTGGATTTGATCACTACCTCCGAGGTGAACGTCGC | | |
| | | | GCTGACGCTGGACACCACCGGCTCGACCTCGACCGGCG | | |
| | | | ATAGCCTGCTGTCCAGCGCGCTGCTGACTGAACTGTCC | | |
| | | | TCGCTGTGTCGGGTGGAAGTGGAAGAGAACATGTCGCT | | |
| | | | GGTGGCGCTGATCGGCAACCAGCTGTCGCAGGCCTGCG | | |
| | | | GCGTCGGCAAAGAGGTGTTCGGGGTGCTGGAGCCATTT | | |
| | | | AATATCCGCCTCATCTGCTACGGCGCCAGCAGCCACAA | | |
| | | | CCTGTGCTTCCTGGTGCCGTCCAGCGATGCCGAGCAGG | | |
| | | | TGGTGCAGACGCTGCATCACAATCTGTTTGAATAA | | |
| lysC | Shewanella | AE015779.1 | GTGCTCGAAAAACGAAAGCTTAGTGGTAGCAAGCTTTT | 35 | |
| | oneidensis | | TGTGAAGAAGTTTGGTGGCACTTCGGTGGGTTCAATTG | | |
| | | | AACGTATCGAAGTGGTTGCCGAACAGATTGCAAAGTCC | | |
| | | | GCTCACAGTGGTGAGCAGCAAGTATTAGTTCTTTCTGC | | |
| | | | TATGGCAGGGGAGACAAATAGGCTATTTGCGCTAGCAG | | |
| | | | CGCAAATCGATCCCCGCGCGAGTGCTCGGGAACTCGAT | | |
| | | | ATGTTGGTCTCAACGGGTGAGCAAATTAGTATTGCGTT | | |
| | | | GATGGCGATGGCGTTGCAGCGTCGCGGTATCAAGGCAA | | |
| | | | GATCGCTCACTGGCGATCAAGTGCAAATCCATACAAAT | | |
| | | | AGTCAGTTTGGTCGTGCCAGTATTGAGAGCGTCGATAC | | |
| | | | GGCGTACTTAACGTCCTTGCTCGAACAAGGCATTGTGC | | |
| | | | CGATTGTGGCAGGGTTTCAAGGGATCGATCCTAATGGC | | |
| | | | GATGTCACAACCTTAGGTCGTGGTGGTTCCGATACGAC | | |
| | | | GGCTGTAGCGCTCGCCGCAGCGTTAAGAGCCGATGAAT | | |
| | | | GCCAGATATTTACCGATGTTTCAGGGGTGTTTACTACA | | |
| | | | GACCCAAATATCGATAGTAGCGCAAGGCGTCTGGATGT | | |
| | | | GATTGGCTTTGACGTCATGCTTGAAATGGCAAAGTTAG | | |
| | | | GCGCTAAAGTACTTCATCCTGATTCTGTTGAATATGCA | | |
| | | | CAGCGTTTTAAAGTACCGCTTCGGGTGTTGTCGAGTTT | | |
| | | | CGAAGCTGGGCAAGGTACATTAATTCAATTTGGTGATG | | |
| | | | AATCTGAGCTTGCGATGGCCGCATCTGTACAAGGTATT | | |
| | | | GCGATCAACAAAGCCTTAGCAACGTTGACCATCGAAGG | | |
| | | | TTTGTTCACCAGCAGTGAGCGTTACCAAGCACTATTGG | | |
| | | | CTTGTTTGGCCCGACTGGAGGTAGATGTTGAATTTATC | | |
| | | | ACTCCTTTGAAATTGAATGAAATTTCTCCTGTTGAGTC | | |
| | | | AGTCAGTTTCATGTTAGCCGAAGCTAAAGTGGATATTT | | |
| | | | TATTGCACGAGCTTGAGGTTTTAAGCGAAAGTCTTGAT | | |
| | | | CTAGGGCAATTGATTGTTGAGCGCCAACGTGCAAAAGT | | |
| | | | GTCTTTAGTTGGCAAAGGTTTACAGGCAAAAGTTGGAT | | |
| | | | TATTGACTAAGATGTTAGATGTATTGGGTAACGAAACA | | |
| | | | ATTCATGCTAAGTTACTTTCGACATCGGAGAGTAAATT | | |
| | | | GTCAACTGTGATCGATGAAAGGGACTTGCACAAGGCGG | | |
| | | | TTCGGGCGTTGCATCATGCTTTCGAGCTAAATAAGGTG | | |
| lysC | Coryne- | AX720328 | GTGGCCCTGGTCGTACAGAAATATGGCGGTTCCTCGCT | 238 | |
| | bacterium | | TGAGAGTGCGGAACGCATTAGAAACGTCGCTGAACGGA | | |
| | glutamicum | | TCGTTGCCACCAAGAAGGCTGGAAATGATGTCGTGGTT | | |
| | | | GTCTGCTCCGCAATGGGAGACACCACGGATGAACTTCT | | |
| | | | AGAACTTGCAGCGGCAGTGAATCCCGTTCCGCCAGCTC | | |
| | | | GTGAAATGGATATGCTCCTGACTGCTGGTGAGCGTATT | | |
| | | | TCTAACGCTCTCGTCGCCATGGCTATTGAGTCCCTTGG | | |
| | | | CGCAGAAGCCCAATCTTTCACGGGCTCTCAGGCTGGTG | | |
| | | | TGCTCACCACCGAGCGCCACGGAAACGCACGCATTGTT | | |
| | | | GATGTCACTCCAGGTCGTGTGCGTGAAGCACTCGATGA | | |
| | | | GGGCAAGATCTGCATTGTTGCTGGTTTCCAGGGTGTTA | | |
| | | | ATAAAGAAACCCGCGATGTCACCACGTTGGGTCGTGGT | | |
| | | | GGTTCTGACACCACTGCAGTTGCGTTGGCAGCTGCTTT | | |
| | | | GAACGCTGATGTGTGTGAGATTTACTCGGACGTTGACG | | |
| | | | GTGTGTATACCGCTGACCCGCGCATCGTTCCTAATGCA | | |
| | | | CAGAAGCTGGAAAAGCTCAGCTTCGAAGAAATGCTGGA | | |
| | | | ACTTGCTGCTGTTGGCTCCAAGATTTTGGTGCTGCGCA | | |
| | | | GTGTTGAATACGCTCGTGCATTCAATGTGCCACTTCGC | | |
| | | | GTACGCTCGTCTTATAGTAATGATCCCGGCACTTTGAT | | |
| | | | TGCCGGCTCTATGGAGGATATTCCTGTGGAAGAAGCAG | | |
| | | | TCCTTACCGGTGTCGCAACCGACAAGTCCGAAGCCAAA | | |
| | | | GTAACCGTTCTGGGTATTTCCGATAAGCCAGGCGAGGC | | |
| | | | TGCGAAGGTTTTCCGTGCGTTGGCTGATGCAGAAATCA | | |
| | | | ACATTGACATGGTTCTGCAGAACGTCTCTTCTGTAGAA | | |
| | | | GACGGCACCACCGACATCACCTTCACCTGCCCTCGTTC | | |
| | | | CGACGGCCGCCGCGCGATGGAGATCTTGAAGAAGCTTC | | |
| | | | AGGTTCAGGGCAACTGGACCAATGTGCTTTACGACGAC | | |
| | | | CAGGTCGGCAAAGTCTCCCTCGTGGGTGCTGGCATGAA | | |
| | | | GTCTCACCCAGGTGTTACCGCAGAGTTCATGGAAGCTC | | |
| | | | TGCGCGATGTCAACGTGAACATCGAATTGATTTCCACC | | |
| | | | TCTGAGATTCGTATTTCCGTGCTGATCCGTGAAGATGA | | |
| | | | TCTGGATGCTGCTGCACGTGCATTGCATGAGCAGTTCC | | |
| | | | AGCTGGGCGGCGAAGACGAAGCCGTCGTTTATGCAGGC | | |
| | | | ACCGGACGC | | |
| aspartokinase | Escherichia | M11812 | ATGTCTGAAATTGTTGTCTCCAAATTTGGCGGTACCAG | 239 | |
| III | coli | | CGTAGCCGATTTTGACGCCATGAACCGCAGCGCTGATA | | |
| | | | TTGTGCTTTCTGATGCCAACGTGCGTTTAGTTGTCCTC | | |
| | | | TCGGCTTCTGCTGGTATCACTAATCTGCTGGTCGCTTT | | |
| | | | AGCTGAAGGACTGGAACCTTGCGAGCGATTCGAAAAAC | | |
| | | | TCGACGCTATCCGCAACATCCAGTTTGCCATTCTGGAA | | |
| | | | CGTCTGCGTTACCCGAACGTTATCCGTGAAGAGATTGA | | |
| | | | ACGTCTGCTGGAGAACATTACTGTTCTGGCAGAAGCGG | | |
| | | | CGGCGCTGGCAACGTCTCCGGCGCTGACAGATGAGCTG | | |
| | | | GTCAGCCACGGCGAGCTGATGTCGACCCTGCTGTTTGT | | |
| | | | TGAGATCCTGCGCGAACGCGATGTTCAGGCACAGTGGT | | |
| | | | TTGATGTGCGTAAAGTGATGCGTACCAACGACCGATTT | | |
| | | | GGTCGTGCAGAGCCAGATATAGCCGCGCTGGCGGAACT | | |
| | | | GGCCGCGCTGCAGCTGCTCCCACGTCTCAATGAAGGCT | | |
| | | | TAGTGATCACCCAGGGATTTATCGGTAGCGAAAATAAA | | |
| | | | GGTCGTACAACGACGCTTGGCCGTGGAGGCAGCGATTA | | |
| | | | TACGGCAGCCTTGCTGGCGGAGGCTTTACACGCATCTC | | |
| | | | GTGTTGATATCTGGACCGACGTCCCGGGCATCTACACC | | |
| | | | ACCGATCCACGCGTAGTTTCCGCAGCAAAACGCATTGA | | |
| | | | TGAAATCGCGTTTGCCGAAGCGGCAGAGATGGCAACTT | | |
| | | | TTGGTGCAAAAGTACTGCATCCGGCAACGTTGCTACCC | | |
| | | | GCAGTACGCAGCGATATCCCGGTCTTTGTCGGCTCCAG | | |
| | | | CAAAGACCCACGCGCAGGTGGTACGCTGGTGTGCAATA | | |
| | | | AAACTGAAAATCCGCCGCTGTTCCGCGCTCTGGCGCTT | | |
| | | | CGTCGCAATCAGACTCTGCTCACTTTGCACAGCCTGAA | | |
| | | | TATGCTGCATTCTCGCGGTTTCCTCGCGGAAGTTTTCG | | |
| | | | GCATCCTCGCGCGGCATAATATTTCGGTAGACTTAATC | | |
| | | | ACCACGTCAGAAGTGAGCGTGGCATTAACCCTTGATAC | | |
| | | | CACCGGTTCAACCTCCACTGGCGATACGTTGCTGACAC | | |
| | | | AATCTCTGCTGATGGAGCTTTCCGCACTGTGTCGGGTG | | |
| | | | GAGGTGGAAGAAGGTCTGGCGCTGGTCGCGTTGATTGG | | |
| | | | CAATGACCTGTCAAAAGCGTGCGCCGTTGGCAAAGAGG | | |
| | | | TATTCGGCGTACTGGAACCGTTCAACATTCGCATGATT | | |
| | | | TGTTATGGCGCATCCAGCCATAACCTGTGCTTCCTGGT | | |
| | | | GCCCGGCGAAGATGCCGAGCAGGTGGTGCAAAAACTGC | | |
| | | | ATAGTAATTTGTTTGAGTAA | | |
| asd | Coryne- | X57226 | ATGACCACCATCGCAGTTGTTGGTGCAACCGGCCAGGT | 240 | |
| | bacterium | | CGGCCAGGTTATGCGCACCCTTTTGGAAGAGCGCAATT | | |
| | glutamicum | | TCCCAGCTGACACTGTTCGTTTCTTTGCTTCCCCACGT | | |
| | | | TCCGCAGGCCGTAAGATTGAATTCCGTGGCACGGAAAT | | |
| | | | CGAGGTAGAAGACATTACTCAGGCAACCGAGGAGTCCC | | |
| | | | TCAAGGACATCGACGTTGCGTTGTTCTCCGCTGGAGGC | | |
| | | | ACCGCTTCCAAGCAGTACGCTCCACTGTTCGCTGCTGC | | |
| | | | AGGCGCGACTGTTGTGGATAACTCTTCTGCTTGGCGCA | | |
| | | | AGGACGACGAGGTTCCACTAATCGTCTCTGAGGTGAAC | | |
| | | | CCTTCCGACAAGGATTCCCTGGTCAAGGGCATTATTGC | | |
| | | | GAACCCTAACTGCACCACCATGGCTGCGATGCCAGTGC | | |
| | | | TGAAGCCACTTCACGATGCCGCTGGTCTTGTAAAGCTT | | |
| | | | CACGTTTCCTCTTACCAGGCTGTTTCCGGTTCTGGTCT | | |
| | | | TGCAGGTGTGGAAACCTTGGCAAAGCAGGTTGCTGCAG | | |
| | | | TTGGAGACCACAACGTTGAGTTCGTCCATGATGGACAG | | |
| | | | GCTGCTGACGCAGGCGATGTCGGACCTTATGTTTCACC | | |
| | | | AATCGCTTACAACGTGCTGCCATTCGCCGGAAACCTCG | | |
| | | | TCGATGACGGCACCTTCGAAACCGATGAAGAGCAGAAG | | |
| | | | CTGCGCAACGAATCCCGCAAGATTCTCGGTCTCCCAGA | | |
| | | | CCTCAAGGTCTCAGGCACCTGCGTTCGCGTGCCGGTTT | | |
| | | | TCACCGGCCACACGCTGACCATTCACGCCGAATTCGAC | | |
| | | | AAGGCAATCACCGTGGACCAGGCGCAGGAGATCTTGGG | | |
| | | | TGCCGCTTCAGGCGTCAAGCTTGTCGACGTCCCAACCC | | |
| | | | CACTTGCAGCTGCCGGCATTGACGAATCCCTCGTTGGA | | |
| | | | CGCATCCGTCAGGACTCCACTGTCGACGATAACCGCGG | | |
| | | | TCTGGTTCTCGTCGTATCTGGCGACAACCTCCGCAAGG | | |
| | | | GTGCTGCGCTAAACACCATCCAGATCGCTGAGCTGCTG | | |
| | | | GTTAAGTAA | | |
| asd | Escherichia | NC_000913 | ATGAAAAATGTTGGTTTTATCGGCTGGCGCGGTATGGT | 241 | |
| | coli | | CGGCTCCGTTCTCATGCAACGCATGGTTGAAGAGCGCG | | |
| | | | ACTTCGACGCCATTCGCCCTGTCTTCTTTTCTACTTCT | | |
| | | | CAGCTTGGCCAGGCTGCGCCGTCTTTTGGCGGAACCAC | | |
| | | | TGGCACACTTCAGGATGCCTTTGATCTGGAGGCGCTAA | | |
| | | | AGGCCCTCGATATCATTGTGACCTGTCAGGGCGGCGAT | | |
| | | | TATACCAACGAAATCTATCCAAAGCTTCGTGAAAGCGG | | |
| | | | ATGGCAAGGTTACTGGATTGACGCAGCATCGTCTCTGC | | |
| | | | GCATGAAAGATGACGCCATCATCATTCTTGACCCCGTC | | |
| | | | AATCAGGACGTCATTACCGACGGATTAAATAATGGCAT | | |
| | | | CAGGACTTTTGTTGGCGGTAACTGTACCGTAAGCCTGA | | |
| | | | TGTTGATGTCGTTGGGTGGTTTATTCGCCAATGATCTT | | |
| | | | GTTGATTGGGTGTCCGTTGCAACCTACCAGGCCGCTTC | | |
| | | | CGGCGGTGGTGCGCGACATATGCGTGAGTTATTAACCC | | |
| | | | AGATGGGCCATCTGTATGGCCATGTGGCAGATGAACTC | | |
| | | | GCGACCCCGTCCTCTGCTATTCTCGATATCGAACGCAA | | |
| | | | AGTCACAACCTTAACCCGTAGCGGTGAGCTGCCGGTGG | | |
| | | | ATAACTTTGGCGTGCCGCTGGCGGGTAGCCTGATTCCG | | |
| | | | TGGATCGACAAACAGCTCGATAACGGTCAGAGCCGCGA | | |
| | | | AGAGTGGAAAGGGCAGGCGGAAACCAACAAGATCCTCA | | |
| | | | ACACATCTTCCGTAATTCCGGTAGATGGTTTATGTGTG | | |
| | | | CGTGTCGGGGCATTGCGCTGCCACAGCCAGGCATTCAC | | |
| | | | TATTAAATTGAAAAAAGATGTGTCTATTCCGACCGTGG | | |
| | | | AAGAACTGCTGGCTGCGCACAATCCGTGGGCGAAAGTC | | |
| | | | GTTCCGAACGATCGGGAAATCACTATGCGTGAGCTAAC | | |
| | | | CCCAGCTGCCGTTACCGGCACGCTGACCACGCCGGTAG | | |
| | | | GCCGCCTGCGTAAGCTGAATATGGGACCAGAGTTCCTG | | |
| | | | TCAGCCTTTACCGTGGGCGACCAGCTGCTGTGGGGGGC | | |
| | | | CGCGGAGCCGCTGCGTCGGATGCTTCGTCAACTGGCG | | |
| ppc | Thermobifida | NZ_AAAQ010 | ATGACACGCGACAGCGCCCGCCAGGAGATGCCCGACCA | 36 | |
| | fusca | 00037.1 | GCTTCGCCGCGACGTCCGGTTGCTCGGCGAAATGCTCG | | |
| | | | GCACCGTACTTGCCGAGAGTGGCGGTCAAGACCTGCTT | | |
| | | | GACGATGTGGAACGACTCCGCCGCGCCGTCATCGGAGC | | |
| | | | TCGCGAGGGGACGGTCGAGGGCAAAGAGATCACCGAGC | | |
| | | | TCGTCGCCTCGTGGCCACTGGAACGCGCCAAGCAGGTG | | |
| | | | GCGCGTGCCTTCACCGTCTACTTCCACCTGGTCAACCT | | |
| | | | GGCTGAAGAGCACCACCGTATGCGCGCCCTGCGGGAAC | | |
| | | | GCGACGACGCGGCCACACCGCAGCGCGAATCGCTGGCT | | |
| | | | GCCGCAGTGCACTCCATCCGCGAAGACGCCGGGCCAGA | | |
| | | | GCGGCTGCGCGAACTCATCGCGGGCATGGAATTCCACC | | |
| | | | CGGTCCTGACCGCGCACCCCACCGAAGCGCGCCGTCGC | | |
| | | | GCCGTCTCCACCGCGATCCAGCGCATCAGTGCCCAACT | | |
| | | | GGAACGCCTGCACGCGGCCCACCCGGGAAGCGGCGCCG | | |
| | | | AAGCCGAGGCGCGTCGCAGACTCCTCGAAGAAATCGAC | | |
| | | | CTGCTGTGGCGAACATCACAGCTCCGCTATACGAAGAT | | |
| | | | GGACCCGCTCGACGAAGTGCGGACCGCCATGGCCGCCT | | |
| | | | TCGACGAGACCATCTTCACCGTCATCCCCGAGGTCTAC | | |
| | | | CGCAGCCTCGACCGGGCGCTCGACCCCGAAGGCTGCGG | | |
| | | | ACGGCGCCCCGCGCTGGCGAAAGCCTTCGTCCGCTACG | | |
| | | | GCAGTTGGATCGGCGGTGACCGCGACGGCAACCCCTTC | | |
| | | | GTCACCCACGAAGTGACGCGGGAAGCCATCACCATCCA | | |
| | | | GTCCGAGCACGTGCTGCGCGCCCTGGAAAACGCCTGCG | | |
| | | | AACGCATCGGCCGCACCCACACCGAGTACACCGGCCTC | | |
| | | | ACCCCGCCCAGCGCGGAACTGCGCGCCGCGCTGAGCAG | | |
| | | | CGCCCGGGCTGCCTACCCGCGCCTGATGCAGGAGATCA | | |
| | | | TCAAGCGCTCGCCCAACGAACCCCACCGCCAGCTCCTG | | |
| | | | CTGCTCGCCGCGGAACGGCTCCGCGCCACCCGGCTGCG | | |
| | | | CAACGCCGACCTCGGCTACCCCAACCCGGAAGCGTTCC | | |
| | | | TCGCCGACCTGCGGACCGTCCAAGAGTCGCTTGCTGCC | | |
| | | | GCGGGCGCTGTGCGCCAAGCCTACGGCGAACTCCAAAA | | |
| | | | CCTCATCTGGCAGGCCGAAACCTTCGGCTTCCACCTCG | | |
| | | | CGGAACTGGAAATCCGCCAGCACAGCGCAGTCCACGCC | | |
| | | | GCCGCACTCAAGGAGATACGCGCTGGCGGGGAACTGTC | | |
| | | | CGAACGTACCGAGGAAGTCCTCGCCACCCTGCGGGTCG | | |
| | | | TCGCCTGGATTCAGGAGCGGTTCGGCGTGGAAGCATGC | | |
| | | | CGCCGCTACATCGTCAGCTTCACCCAGTCCGCTGACGA | | |
| | | | CATCGCCGCCGTCTACGAGCTCGCCGAGCACGCCATGC | | |
| | | | CCCCGGGCAAGGCGCCCATCCTCGACGTCATCCCGCTC | | |
| | | | TTCGAAACCGGTGCCGACCTGGACGCGGCCCCCCAGGT | | |
| | | | CCTCGACGGCATGCTCCGCCTGCCCGCCGTCCAGCGCC | | |
| | | | GCCTCGAGCAGACCGGCCGCCGCATGGAAGTCATGCTC | | |
| | | | GGCTACAGCGACTCCGCCAAGGACGTCGGCCCGGTCAG | | |
| | | | CGCCACCCTGCGGCTCTACGACGCCCAGGCGCGGCTGG | | |
| | | | CCGAATGGGCGCGCGAGCACGACATCAAACTCACCCTG | | |
| | | | TTCCACGGCCGCGGCGGTGCCCTGGGCCGCGGCGGCGG | | |
| | | | GCCCGCCAACCGGGCCGTCCTCGCCCAGGCCCCCGGAT | | |
| | | | CGGTGGACGGCCGCTTCAAGGTCACCGAGCAGGGCGPA | | |
| | | | GTCATCTTCGCCCGCTACGGTCAGCGGGCGATCGCCCA | | |
| | | | CCGCCACATCGAACAGGTGGGCCACGCCGTGCTCATGG | | |
| | | | CCTCCACCGAAAGCGTGCAGCGGAGAGCCGCCGAGGCA | | |
| | | | GCCGCCCGGTTCCGCGGTATGGCTGACCGCATCGCCGA | | |
| | | | AGCCGCCCACGCCGCCTACCGCGCCCTCGTCGACACTG | | |
| | | | AAGGGTTCGCGGAGTGGTTCTCCCGGGTCAGCCCGTTG | | |
| | | | GAGGAGCTGAGTGAGCTGCGGCTGGGGTCGCGTCCGGC | | |
| | | | GCGCCGCTCGGCTGCCCGCGGCCTCGACGACCTCCGCG | | |
| | | | CTATCCCGTGGGTGTTCGCCTGGACCCAGACCCGGGTC | | |
| | | | AATCTGCCTGGCTGGTACGGGCTCGGCAGCGGCCTGGC | | |
| | | | CGCGGTCGACGACCTGGAAGCGCTGCACACCGCCTACA | | |
| | | | AGGAGTGGCCGCTGTTCGCCTCGCTGCTGGACAACGCC | | |
| | | | GAGATGAGCCTGGCCAAGACCGACCGGGTGATCGCCGA | | |
| | | | GCGCTACCTCGCGCTGGGCGGGCGTCCAGAGCTCACCG | | |
| | | | AACAGGTCCTCGCCGAATACGACCGCACCCGGGAACTG | | |
| | | | GTCCTCAAAGTCACGCGGCACACCCGCCTCCTCGAGAA | | |
| | | | CCGCCGGGTGCTGTCCCGCGCGGTCGACCTGCGCAACC | | |
| | | | CCTACGTGGACGCCCTTTCGCACCTGCAGCTGCGTGCT | | |
| | | | CTGGAAGCCCTGCGCACCGGGGAAGCCGACCGGCTGTC | | |
| | | | CGAGGAGGACCGCAACCACCTGGAACGGCTCCTGCTGC | | |
| | | | TCTCGGTCAACGGTGTGGCCGCAGGGCTCCAGAACACT | | |
| | | | GGG | | |
| ppc | Mycobacterium | AL583919.1 | ATGGTTGAGTTTTCCGATGCTATACTGGAACCGATCGG | 37 | |
| | leprae (can be | | TGCTGTCCAGCGGACTCGAGTCGGTCGCGAGGCGACTG | | |
| | used to clone | | AACCTATGCGGGCCGACATCAGGCTATTGGGTACCATT | | |
| | M. smegmatis | | CTTGGTGATACTCTGCGTGAGCAGAACGGTGATGAGGT | | |
| | gene) | | ATTCGATCTCGTCGAACGAGTCCGGGTCGAGTCGTTCC | | |
| | | | GGGTGCGGCGTTCTGAGATTGATCGGGCCGATATGGCG | | |
| | | | CGTATGTTCTCTGGTCTCGACATTCACCTGGCCATCCC | | |
| | | | GATCATCCGGGCGTTTAGCCATTTCGCATTGTTGGCCA | | |
| | | | ACGTTGCCGAGGACATCCACCGGGAGCGTCGGCGCCAT | | |
| | | | ATTCACCTCGACGCCGGCGAGCCACTGCGGGATAGCAG | | |
| | | | TTTAGCGGCCACTTACGCGAAACTTGATCTGGCAAAAC | | |
| | | | TAGATTCGGCCACCGTGGCAGATGCCCTTACTGGTGCA | | |
| | | | GTGGTCTCGCCGGTGATTACTGCGCATCCCACCGAGAC | | |
| | | | CCGTCGGCGTACCGTATTTGTTACCCAACGCCGGATTA | | |
| | | | CCGAGTTGATGCGGCTGCACGCGGAGGGACACACCGAA | | |
| | | | ACCGCCGATGGCCGCAGCATTGAGCGTGAATTGCGCCG | | |
| | | | TCAAATTCTCACGCTGTGGCAGACGGCATTGATTCGGT | | |
| | | | TGGCGCGATTGCAGATCTCCGACGAGATCGACGTAGGG | | |
| | | | CTGCGATATTACTCTGCCGCGCTTTTCCATGTGATTCC | | |
| | | | GCAGGTGAATTCCGAGGTGCGCAACGCGTTGCGTGCCC | | |
| | | | GGTGGCCCGACGCCGAGCTGCTGTCCGGCCCTATACTG | | |
| | | | CAACCCGGATCGTGGATCGGTGGTGACCGGGACGGAAA | | |
| | | | CCCGAACGTGACTGCCGACGTGGTGCGGCGAGCGACCG | | |
| | | | GCAGCGCTGCCTACACCGTGGTGGCGCACTATTTGGCT | | |
| | | | GAACTCACCCACCTCGAGCAGGAGCTGTCGATGTCGGC | | |
| | | | GCGACTGATAACCGTCACCCCTGAGCTGGCCACGCTGG | | |
| | | | CCGCTAGCTGTCAGGACGCGGCCTGTGCCGACGAGCCG | | |
| | | | TACCGGCGGGCATTGCGGGTGATCCGCGGTCGATTGTC | | |
| | | | CTCGACTGCCGCCCACATCCTGGATCAGCAGCCACCCA | | |
| | | | ACCAGCTTGGTCTGGGTTTGCCACCGTATTCGACGCCA | | |
| | | | GCCGAACTATGTGCCGATCTGGACACCATCGAAGCCTC | | |
| | | | CCTGTGCACGCACGGCGCCGCGTTGTTAGCCGACGATC | | |
| | | | GGTTGGCGCTGTTGCGAGAAGGTGTTGGAGTCTTTGGG | | |
| | | | TTTCACTTGTGCGGTCTGGATATGCGGCAAAATTCCGA | | |
| | | | CGTGCACGAAGAGGTGGTCGCTGAGCTGTTGGCGTGGG | | |
| | | | CCGGGATGCACCAGGACTACAGTTCGTTGCCCGAAGAT | | |
| | | | CAAAGAGTCAAGCTGCTGGTGGCCGAACTCGGTAACCG | | |
| | | | CCGCCCGTTGGTCGGGGATCGTGCGCAATTATCCGATT | | |
| | | | TGGCGCGCGGCGAGCTGGCCGTTCTTGCGGCCGCTGCC | | |
| | | | CACGCCGTTGAGCTCTACGGATCGGCCGCGGTGCCCAA | | |
| | | | CTACATCATCTCGATGTGTCAGTCTGTGTCGGATGTCC | | |
| | | | TGGAGGTCGCGATCCTCTTGAAGGAGACTGGCCTGTTA | | |
| | | | GACGCCTCCGGGTCGCAGCCGTACTGTCCGGTGGGCAT | | |
| | | | CTCGCCGCTGTTCGAGACGATCGACGATCTGCACAACG | | |
| | | | GGGCGGCCATTCTGCACGCGATGCTGGAACTTCCGCTA | | |
| | | | TATCGAACGCTGGTGGCTGCTCGCGGTAACTGGCAGGA | | |
| | | | AGTGATGCTCGGCTACTCCGATTCCAACAAAGATGGCG | | |
| | | | GCTATCTGGCCGCCAACTGGGCGGTTTACCGCGCCGAG | | |
| | | | CTCGCTCTGGTAGACGTGGCCCGCAAAACCGGAATCCG | | |
| | | | TTTGCGACTTTTCCATGGTCGTGGCGGCACTGTCGGAC | | |
| | | | GTGGCGGCGGTCCTAGCTATCAAGCTATTCTGGCGCAA | | |
| | | | CCCCCGGGGGCGGTAAACGGCTCGTTGCGTCTCACCGA | | |
| | | | GCAAGGCGAGGTCATAGCCGCCAAATACGCCGAACCGC | | |
| | | | AAATAGCACGACGAAACCTAGAGAGTTTGGTGGCCGCG | | |
| | | | ACCCTAGAATCAACTCTCTTGGATGTTGAAGGCTTAGG | | |
| | | | CGATGCGGCTGAATCTGCTTACGCCATACTCGATGAAG | | |
| | | | TAGCCGGCCTCGCGCGGCGATCCTACGCTGAATTAGTC | | |
| | | | AACACACCGGGTTTCGTTGACTATTTCCAAGCTTCCAC | | |
| | | | GCCGGTCAGCGAGATCGGATCGTTGAACATTGGCAACC | | |
| | | | GACCGACATCACGTAAGCCTACCACGTCGATCGCGGAT | | |
| | | | CTTCGTGCTATTCCGTGGGTACTGGCATGGAGCCAATC | | |
| | | | GCGAGTCATGCTCCCAGGTTGGTATGGCACCGGATCGG | | |
| | | | CGTTTCAGCAGTGGGTTGCGGCTGGACCCGAAAGTGAA | | |
| | | | TCACAGCGGGTAGAAATGCTGCATGACCTCTATCAGCG | | |
| | | | TTGGCCGTTCTTTCGAAGTGTGCTGTCGAACATGGCGC | | |
| | | | AGGTACTGGCCAAAAGTGATCTGGGCCTGGCGGCCCGC | | |
| | | | TATGCTGAGCTGGTGGTCGACGAAGCCTTGCGGCGCAG | | |
| | | | AGTGTTTGACAAGATCGCCGACGAGCATCGGCGAACCA | | |
| | | | TTGCCATCCACAAGCTCATTACGGGTCATGACGATCTG | | |
| | | | CTTGCTGACAACCCGGCTCTGGCGCGTTCGGTGTTCAA | | |
| | | | CCGCTTCCCGTATCTGGAGCCGTTAAACCACCTTCAGG | | |
| | | | TGGAGCTATTGCGCCGCTACCGCTCGGGTCACGACGAC | | |
| | | | GAAATGGTGCAACGCGGCATCCTTTTGACAATGAACGG | | |
| | | | ATTGGCCAGCGCGCTACGTAACAGCGGC | | |
| ppc | Streptomyces | AF177946.1 | GTGAGCAGTGCCGACGACCAGACCACCACGACGACCAG | 38 | |
| | coelicolor | | CAGTGAACTGCGCGCCGACATCCGCCGGCTGGGTGATC | | |
| | | | TCCTCGGGGAGACCCTGGTCCGGCAGGAGGGCCCCGAA | | |
| | | | CTGCTGGAACTCGTCGAGAAGGTACGCCGACTCACCCG | | |
| | | | AGAGGACGGCGAGGCCGCCGCCGAACTGCTGCGCGGCA | | |
| | | | CCGAACTGGAGACCGCCGCCAAGCTCGTCCGCGCCTTC | | |
| | | | TCCACCTACTTCCACCTGGCCAACGTCACCGAGCAGGT | | |
| | | | CCACCGCGGCCGCGAGCTGGGCGCCAAGCGCGCCGCCG | | |
| | | | AGGGCGGACTGCTCGCCCGTACGGCCGACCGGCTGAAG | | |
| | | | GACGCCGACCCCGAGCACCTGCGCGAGACGGTCCGCAA | | |
| | | | CCTCAACGTGCGCCCCGTGTTCACCGCGCACCCCACCG | | |
| | | | AGGCCGCCCGCCGCTCCGTCCTCAACAAGCTGCGCCGC | | |
| | | | ATCGCCGCCCTCCTGGACACCCCGGTCAACGAGTCGGA | | |
| | | | CCGGCGCCGCCTGGACACCCGCCTCGCCGAGAACATCG | | |
| | | | ACCTCGTCTGGCAGACCGACGAGCTGCGCGTCGTGCGC | | |
| | | | CCCGAGCCCGCCGACGAGGCCCGCAACGCCATCTACTA | | |
| | | | CCTCGACGAGCTGCACCTGGGCGCCGTCGGCGACGTCC | | |
| | | | TCGAAGACCTCACCGCCGAGCTGGAGCGGGCCGGCGTC | | |
| | | | AAGCTCCCCGACGACACCCGCCCCCTCACCTTCGGCAC | | |
| | | | CTGGATCGGCGGCGACCGCGACGGCAACCCCAACGTCA | | |
| | | | CCCCCCAGGTGACCTGGGACGTCCTCATCCTCCAGCAC | | |
| | | | GAGCACGGCATCAACGACGCCCTGGAGATGATCGACGA | | |
| | | | GCTGCGCGGCTTCCTCTCCAACTCCATCCGGTACGCCG | | |
| | | | GTGCGACCGAGGAACTGCTCGCCTCGCTCCAGGCCGAC | | |
| | | | CTGGAACGCCTCCCCGAGATCAGCCCCCGCTACAAGCG | | |
| | | | CCTCAACGCCGAGGAGCCCTACCGGCTCAAGGCCACCT | | |
| | | | GCATCCGCCAGAAGCTGGAGAACACCAAGCAGCGCCTC | | |
| | | | GCCAAGGGCACCCCCCACGAGGACGGCCGCGACTACCT | | |
| | | | CGGCACCGCCCAGCTCATCGACGACCTGCGCATCGTCC | | |
| | | | AGACCTCGCTGCGCGAACACCGCGGCGGCCTGTTCGCC | | |
| | | | GACGGGCGCCTCGCCCGCACCATCCGCACCCTGGCCGC | | |
| | | | CTTCGGCCTCCAGCTCGCCACCATGGACGTCCGCGAGC | | |
| | | | ACGCCGACGCCCACCACCACGCCCTCGGCCAGCTCTTC | | |
| | | | GACCGGCTCGGCGAGGAGTCCTGGCGCTACGCCGACAT | | |
| | | | GCCGCGCGAGTACCGCACCAAGCTCCTCGCCAAGGAAC | | |
| | | | TGCGCTCCCGCAGGCCGCTGGCCCCCAGCCCCGCCCCC | | |
| | | | GTCGACGCGCCCGGCGAGAAGACCCTCGGCGTCTTCCA | | |
| | | | GACCGTCCGCCGCGCCCTGGAGGTCTTCGGCCCCGAGG | | |
| | | | TCATCGAGTCCTACATCATCTCCATGTGCCAGGGCGCC | | |
| | | | GACGACGTCTTCGCCGCGGCGGTACTGGCCCGCGAGGC | | |
| | | | CGGGCTGATCGACCTGCACGCCGGCTGGGCGAAGATCG | | |
| | | | GCATCGTGCCGCTGCTGGAGACCACCGACGAGCTGAAG | | |
| | | | GCCGCCGACACCATCCTGGAGGACCTGCTCGCCGACCC | | |
| | | | CTCCTACCGGCGCCTGGTCGCGCTGCGCGGCGACGTCC | | |
| | | | AGGAGGTCATGCTCGGCTACTCCGACTCCTCCAAGTTC | | |
| | | | GGCGGTATCACCACCAGCCAGTGGGAGATCCACCGCGC | | |
| | | | CCAGCGCCGGCTGCGCGACGTCGCCCACCGCTACGGCG | | |
| | | | TACGGCTGCGCCTCTTCCACGGCCGCGGCGGCACCGTC | | |
| | | | GGCCGCGGCGGCGGCCCCACCCACGACGCCATCCTCGC | | |
| | | | CCAGCCCTGGGGCACCCTGGAGGGCGAGATCAAGGTCA | | |
| | | | CCGAGCAGGGCGAGGTCATCTCCGACAAGTACCTCATC | | |
| | | | CCCGCCCTCGCCCGGGAGAACCTGGAGCTGACCGTCGC | | |
| | | | GGCCACCCTCCAGGCCTCCGCCCTGCACACCGCGCCCC | | |
| | | | GCCAGTCCGACGAGGCCCTGGCCCGCTGGGACGCCGCG | | |
| | | | ATGGACGTCGTCTCCGACGCCGCCCACACCGCCTACCG | | |
| | | | GCACCTGGTCGAGGACCCCGACCTGCCGACCTACTTCC | | |
| | | | TGGCCTCCACCCCGGTCGACCAGCTCGCCGACCTGCAC | | |
| | | | CTGGGCTCGCGGCCCTCCCGCCGCCCCGGCTCGGGCGT | | |
| | | | CTCGCTCGACGGACTGCGCGCCATCCCGTGGGTGTTCG | | |
| | | | GCTGGACCCAGTCCCGGCAGATCGTCCCCGGCTGGTAC | | |
| | | | GGCGTCGGCTCCGGCCTCAAGGCCCTGCGCGAGGCGGG | | |
| | | | CCTGGACACCGTGCTCGACGAGATGCACCAGCAGTGGC | | |
| | | | ACTTCTTCCGCAACTTCATCTCCAACGTCGAGATGACC | | |
| | | | CTCGCCAAGACCGACCTGCGCATCGCCCAGCACTACGT | | |
| | | | CGACACCCTCGTCCCGGACGAGCTCAAGCACGTCTTCG | | |
| | | | ACACCATCAAGGCCGAGCACGAGCTCACCGTCGCCGAG | | |
| | | | GTCCTGCGCGTCACCGGCGAGAGTGAACTGCTGGACGC | | |
| | | | CGACCCGGTCCTCAAGCAGACCTTCACCATCCGCGACG | | |
| | | | CCTACCTCGACCCCATCTCCTACCTCCAGGTCGCCCTC | | |
| | | | CTCGGCCGTCAGCGCGAGGCCGCCGCCGCGAACGAGGA | | |
| | | | CCCGGACCCCCTCCTCGCCCGAGCCCTCCTCCTCACCG | | |
| | | | TCAACGGCGTGGCAGCGGGCCTGCGCAACACCGGCTGA | | |
| ppc | Erwinia | | ATGAATGAACAATATTCCGCCATGCGGAGCAATGTCAG | 39 | |
| | chrysanthemi | | CATGCTGGGTAAACTACTCGGCGACACCATCAAGGATG | | |
| | | | CGCTGGGCGCCAATATCCTTGAGCGTGTTGAAACAATC | | |
| | | | CGCAAGCTGTCCAAAGCCTCGCGGGCCGGCAGCGAAAC | | |
| | | | ACACCGTCAGGAACTGCTGACCACACTGCAGAACCTGT | | |
| | | | CCAACGATGAACTGCTGCCGGTCGCCCGCGCATTCAGC | | |
| | | | CAGTTCCTTAACCTGACCAACACCGCCGAGCAATACCA | | |
| | | | CAGTATCTCTCCGCACGGCGAAGCGGCCAGTAACCCGG | | |
| | | | AAGCGCTGGCGACGGTGTTTCGCAGTCTGAAAAGCCGC | | |
| | | | GACAACCTGAGCGACAAGGATATCCGCGACGCGGTGGA | | |
| | | | GTCGCTCTCCATCGAGCTGGTGTTGACCGCGCACCCGA | | |
| | | | CCGAAATCACCCGCCGTACGCTGATCCACAAACTGGTT | | |
| | | | GAAGTGAATACCTGCCTCAAGCAGCTCGATCACGACGA | | |
| | | | TCTGGCCGATTATGAACGCCACCAGATCATGCGCCGTC | | |
| | | | TGCGCCAGCTGATCGCCCAATACTGGCATACCGATGAA | | |
| | | | ATCCGCAAAATCCGCCCGACGCCGGTGGACGAAGCCAA | | |
| | | | GTGGGGTTTCGCGGTGGTGGAAAATAGCCTGTGGGAAG | | |
| | | | GGGTGCCGGCGTTTCTGCGCGAACTCGACGAGCAGATG | | |
| | | | GGTAAAGAGTTGGGCTACCGTCTGCCGGTGGATTCGGT | | |
| | | | GCCGGTGCGCTTCACCTCCTGGATGGGCGGCGACCGCG | | |
| | | | ACGGCAACCCGAACGTGACCTCTGAAGTCACCCGCCGC | | |
| | | | GTGCTGCTGCTAAGCCGCTGGAAAGCCGCGGACCTGTT | | |
| | | | CCTGCGCGACGTACAGGTGCTGGTTTCCGAACTGTCGA | | |
| | | | TGACCACCTGTACGCCGGAACTGCAACAACTGGCAGGC | | |
| | | | GGCGACGAGGTGCAGGAACCCTACCGCGAACTGATGAA | | |
| | | | AGCGCTGCGCGCACAGTTGACTGCTACCCTGGATTATC | | |
| | | | TGGACGCGCGTCTGAAAGATGAACAACGGATGCCGCCC | | |
| | | | AAAGATCTGCTGGTCACCAACGAGCAGTTATGGGAACC | | |
| | | | GCTGTACGCCTGTTACCAGTCGCTGCATGCCTGCGGCA | | |
| | | | TGGGCATCATCGCCGATGGTCAATTGCTCGATACCCTG | | |
| | | | CGCCGGGTGCGCTGCTTTGGCGTGCCGCTGGTGCGTAT | | |
| | | | CGACGTACGTCAGGAGAGCACCCGTCACACCGACGCGC | | |
| | | | TGGCGGAAATCACCCGCTATCTGGGGCTGGGAGACTAC | | |
| | | | GAAAGCTGGTCGGAATCCGACAAGCAGGCGTTCCTGAT | | |
| | | | CCGCGAACTTAACTCCAAGCGTCCGCTGCTGCCGCGCC | | |
| | | | AGTGGGAACCGAGCGCCGACACCCAGGAAGTGCTGGAA | | |
| | | | ACCTGCCGGGTGATCGCCGAAACCCCGCGCGACTCCAT | | |
| | | | CGCCGCCTATGTAATTTCGATGGCGCGCACCCCGTCCG | | |
| | | | ACGTGCTGGCGGTGCATTTGCTGCTGAAAGAAGCCGGC | | |
| | | | TGTCCGTACGCGCTGCCGGTGGCGCCGCTGTTCGAAAC | | |
| | | | GCTGGACGACCTGAATAACGCCGACAGCGTAATGATCC | | |
| | | | AGTTGCTCAACATCGACTGGTATCGCGGCTTCATTCAG | | |
| | | | GGCAAGCAGATGGTGATGATCGGCTATTCCGACTCCGC | | |
| | | | CAAAGACGCCGGGGTGATGGCGGCCTCCTGGGCGCAGT | | |
| | | | ACCGCGCGCAAGACGCACTGATCAAGACCTGCGAGAAA | | |
| | | | TACGGCATCGCCCTGACGCTGTTTCACGGTCGCGGCGG | | |
| | | | TTCGATTGGCCGCGGCGGCGCGCCGGCTCACGCCGCGC | | |
| | | | TGCTCTCCCAACCGCCGGGCAGCCTGAAAGGCGGCCTG | | |
| | | | CGCGTCACCGAACAGGGCGAGATGATCCGCTTTAAGTT | | |
| | | | CGGCCTGCCGGAAGTCACCATTAGCAGCCTGTCGCTCT | | |
| | | | ACACGTCCGCCATTCTGGAAGCCAACCTGTTGCCGCCG | | |
| | | | CCGGAGCCGAAGCAGGAGTGGCATCACATCATGAACGA | | |
| | | | GCTGTCGCGCATTTCCTGCGACATGTACCGCGGCTACG | | |
| | | | TACGGGAAAACCCGGATTTCGTGCCCTACTTCCGTGCC | | |
| | | | GCCACGCCGGAGCTGGAACTGGGCAAACTGCCGCTGGG | | |
| | | | GTCACGTCCGGCCAAGCGTCGGCCGAACGGCGGCGTGG | | |
| | | | AAAGCCTGCGCGCCATCCCGTGGATTTTCGCCTGGACC | | |
| | | | CAGAACCGCCTGATGCTGCCCGCCTGGTTGGGCGCCGG | | |
| | | | CGCCGCGCTGCAAAAAGTGATCGACGACGGTCACCAGA | | |
| | | | ACCAGCTGGAAGCCATGTGCCGCGACTGGCCGTTCTTC | | |
| | | | TCCACCCGTATCGGTATGCTGGAAATGGTATTCGCCAA | | |
| | | | GGCCGACCTATGGCTGGCGGAATACTACGATCAGCGGC | | |
| | | | TGGTGGACGAGAAACTGTGGTCGCTCGGCAAACAGCTG | | |
| | | | CGCGAACAGCTGGAAAGAGACATCAAAGCGGTGTTGAC | | |
| | | | CATCTCCAACGACGACCATCTGATGGCCGACCTGCCGT | | |
| | | | GGATCGCCGAATCCATCGCGCTACGCAACGTCTACACC | | |
| | | | GACCCGCTCAACGTGCTGCAGGCGGAGCTGCTGCACCG | | |
| | | | TTCACGCCAGCAGGAAACACTGGACCCGCAGGTGGAAC | | |
| | | | AGGCGCTGATGGTCACCATCGCCGGCGTCGCCGCCGGG | | |
| | | | ATGCGCAATACCGGCTAA | | |
| ppc | Coryne- | NC_003450 | ATGACTGATTTTTTACGCGATGACATCAGGTTCCTCGG | 242 | |
| | bacterium | | TCAAATCCTCGGTGAGGTAATTGCGGAACAAGAAGGCC | | |
| | glutamicum | | AGGAGGTTTATGAACTGGTCGAACAAGCGCGCCTGACT | | |
| | | | TCTTTTGATATCGCCAAGGGCAACGCCGAAATGGATAG | | |
| | | | CCTGGTTCAGGTTTTCGACGGCATTACTCCAGCCAAGG | | |
| | | | CAACACCGATTGCTCGCGCATTTTCCCACTTCGCTCTG | | |
| | | | CTGGCTAACCTGGCGGAAGACCTCTACGATGAAGAGCT | | |
| | | | TCGTGAACAGGCTCTCGATGCAGGCGACACCCCTCCGG | | |
| | | | ACAGCACTCTTGATGCCACCTGGCTGAAACTCAATGAG | | |
| | | | GGCAATGTTGGCGCAGAAGCTGTGGCCGATGTGCTGCG | | |
| | | | CAATGCTGAGGTGGCGCCGGTTCTGACTGCGCACCCAA | | |
| | | | CTGAGACTCGCCGCCGCACTGTTTTTGATGCGCAAAAG | | |
| | | | TGGATCACCACCCACATGCGTGAACGCCACGCTTTGCA | | |
| | | | GTCTGCGGAGCCTACCGCTCGTACGCAAAGCAAGTTGG | | |
| | | | ATGAGATCGAGAAGAACATCCGCCGTCGCATCACCATT | | |
| | | | TTGTGGCAGACCGCGTTGATTCGTGTGGCCCGCCCACG | | |
| | | | TATCGAGGACGAGATCGAAGTAGGGCTGCGCTACTACA | | |
| | | | AGCTGAGCCTTTTGGAAGAGATTCCACGTATCAACCGT | | |
| | | | GATGTGGCTGTTGAGCTTCGTGAGCGTTTCGGCGAGGG | | |
| | | | TGTTCCTTTGAAGCCCGTGGTCAAGCCAGGTTCCTGGA | | |
| | | | TTGGTGGAGACCACGACGGTAACCCTTATGTCACCGCG | | |
| | | | GAAACAGTTGAGTATTCCACTCACCGCGCTGCGGAAAC | | |
| | | | CGTGCTCAAGTACTATGCACGCCAGCTGCATTCCCTCG | | |
| | | | AGCATGAGCTCAGCCTGTCGGACCGCATGAATAAGGTC | | |
| | | | ACCCCGCAGCTGCTTGCGCTGGCAGATGCAGGGCACAA | | |
| | | | CGACGTGCCAAGCCGCGTGGATGAGCCTTATCGACGCG | | |
| | | | CCGTCCATGGCGTTCGCGGACGTATCCTCGCGACGACG | | |
| | | | GCCGAGCTGATCGGCGAGGACGCCGTTGAGGGCGTGTG | | |
| | | | GTTCAAGGTCTTTACTCCATACGCATCTCCGGAAGAAT | | |
| | | | TCTTAAACGATGCGTTGACCATTGATCATTCTCTGCGT | | |
| | | | GAATCCAAGGACGTTCTCATTGCCGATGATCGTTTGTC | | |
| | | | TGTGCTGATTTCTGCCATCGAGAGCTTTGGATTCAACC | | |
| | | | TTTACGCACTGGATCTGCGCCAAAACTCCGAAAGCTAC | | |
| | | | GAGGACGTCCTCACCGAGCTTTTCGAACGCGCCCAAGT | | |
| | | | CACCGCAAACTACCGCGAGCTGTCTGAAGCAGAGAAGC | | |
| | | | TTGAGGTGCTGCTGAAGGAACTGCGCAGCCCTCGTCCG | | |
| | | | CTGATCCCGCACGGTTCAGATGAATACAGCGAGGTCAC | | |
| | | | CGACCGCGAGCTCGGCATCTTCCGCACCGCGTCGGAGG | | |
| | | | CTGTTAAGAAATTCGGGCCACGGATGGTGCCTCACTGC | | |
| | | | ATCATCTCCATGGCATCATCGGTCACCGATGTGCTCGA | | |
| | | | GCCGATGGTGTTGCTCAAGGAATTCGGACTCATCGCAG | | |
| | | | CCAACGGCGACAACCCACGCGGCACCGTCGATGTCATC | | |
| | | | CCACTGTTCGAAACCATCGAAGATCTCCAGGCCGGCGC | | |
| | | | CGGAATCCTCGACGAACTGTGGAAAATTGATCTCTACC | | |
| | | | GCAACTACCTCCTGCAGCGCGACAACGTCCAGGAAGTC | | |
| | | | ATGCTCGGTTACTCCGATTCCAACAAGGATGGCGGATA | | |
| | | | TTTCTCCGCAAACTGGGCGCTTTACGACGCGGAACTGC | | |
| | | | AGCTCGTCGAACTATGCCGATCAGCCGGGGTCAAGCTT | | |
| | | | CGCCTGTTCCACGGCCGTGGTGGCACCGTCGGCCGCGG | | |
| | | | TGGCGGACCTTCCTACGACGCGATTCTTGCCCAGCCCA | | |
| | | | GGGGGGCTGTCCAAGGTTCCGTGCGCATCACCGAGCAG | | |
| | | | GGCGAGATCATCTCCGCTAAGTACGGCAACCCCGAAAC | | |
| | | | CGCGCGCCGAAACCTCGAAGCCCTGGTCTCAGCCACGC | | |
| | | | TTGAGGCATCGCTTCTCGACGTCTCCGAACTCACCGAT | | |
| | | | CACCAACGCGCGTACGACATCATGAGTGAGATCTCTGA | | |
| | | | GCTCAGCTTGAAGAAGTACGCCTCCTTGGTGCACGAGG | | |
| | | | ATCAAGGCTTCATCGATTACTTCACCCAGTCCACGCCG | | |
| | | | CTGCAGGAGATTGGATCCCTCAACATCGGATCCAGGCC | | |
| | | | TTCCTCACGCAAGCAGACCTCCTCGGTGGAAGATTTGC | | |
| | | | GAGCCATCCCATGGGTGCTCAGCTGGTCACAGTCTCGT | | |
| | | | GTCATGCTGCCAGGCTGGTTTGGTGTCGGAACCGCATT | | |
| | | | AGAGCAGTGGATTGGCGAAGGGGAGCAGGCCACCCAAC | | |
| | | | GCATTGCCGAGCTGCAAACACTCAATGAGTCCTGGCCA | | |
| | | | TTTTTCACCTCAGTGTTGGATAACATGGCTCAGGTGAT | | |
| | | | GTCCAAGGCAGAGCTGCGTTTGGCAAAGCTCTACGCAG | | |
| | | | ACCTGATCCCAGATACGGAAGTAGCCGAGCGAGTCTAT | | |
| | | | TCCGTCATCCGCGAGGAGTACTTCCTGACCAAGAAGAT | | |
| | | | GTTCTGCGTAATCACCGGCTCTGATGATCTGCTTGATG | | |
| | | | ACAACCCACTTCTCGCACGCTCTGTCCAGCGCCGATAC | | |
| | | | CCCTACCTGCTTCCACTCAACGTGATCCAGGTAGAGAT | | |
| | | | GATGCGACGCTACCGAAAAGGCGACCAAAGCGAGCAAG | | |
| | | | TGTCCCGCAACATTCAGCTGACCATGAACGGTCTTTCC | | |
| | | | ACTGCGCTGCGCAACTCCGGC | | |
| ppc | Escherichia | X05903 | ATGAACGAACAATATTCCGCATTGCGTAGTAATGTCAG | 243 | |
| | coli | | TATGCTCGGCAAAGTGCTGGGAGAAACCATCAAGGATG | | |
| | | | CGTTGGGAGAACACATTCTTGAACGCGTAGAAACTATC | | |
| | | | CGTAAGTTGTCGAAATCTTCACGCGCTGGCAATGATGC | | |
| | | | TAACCGCCAGGAGTTGCTCACCACCTTACAAAATTTGT | | |
| | | | CGAACGACGAGCTGCTGCCCGTTGCGCGTGCGTTTAGT | | |
| | | | CAGTTCCTGAACCTGGCCAACACCGCCGAGCAATACCA | | |
| | | | CAGCATTTCGCCGAAAGGCGAAGCTGCCAGCAACCCGG | | |
| | | | AAGTGATCGCCCGCACCCTGCGTAAACTGAAAAACCAG | | |
| | | | CCGGAACTGAGCGAAGACACCATCAAAAAAGCAGTGGA | | |
| | | | ATCGCTGTCGCTGGAACTGGTCCTCACGGCTCACCCAA | | |
| | | | CCGAAATTACCCGTCGTACACTGATCCACAAAATGGTG | | |
| | | | GAAGTGAACGCCTGTTTAAAACAGCTCGATAACAAAGA | | |
| | | | TATCGCTGACTACGAACACAACCAGCTGATGCGTCGCC | | |
| | | | TGCGCCAGTTGATCGCCCAGTCATGGCATACCGATGAA | | |
| | | | ATCCGTAAGCTGCGTCCAAGCCCGGTAGATGAAGCCAA | | |
| | | | ATGGGGCTTTGCCGTAGTGGAAAACAGCCTGTGGCAAG | | |
| | | | GCGTACCAAATTACCTGCGCGAACTGAACGAACAACTG | | |
| | | | GAAGAGAACCTCGGCTACAAACTGCCCGTCGAATTTGT | | |
| | | | TCCGGTCCGTTTTACTTCGTGGATGGGCGGCGACCGCG | | |
| | | | ACGGCAACCCGAACGTCACTGCCGATATCACCCGCCAC | | |
| | | | GTCCTGCTACTCAGCCGCTGGAAAGCCACCGATTTGTT | | |
| | | | CCTGAAAGATATTCAGGTGCTGGTTTCTGAACTGTCGA | | |
| | | | TGGTTGAAGCGACCCCTGAACTGCTGGCGCTGGTTGGC | | |
| | | | GAAGAAGGTGCCGCAGAACCGTATCGCTATCTGATGAA | | |
| | | | AAACCTGCGTTCTCGCCTGATGGCGACACAGGCATGGC | | |
| | | | TGGAAGCGCGCCTGAAAGGCGAAGAACTGCCAAAACCA | | |
| | | | GAAGGCCTGCTGACACAAAACGAAGAACTGTGGGAACC | | |
| | | | GCTCTACGCTTGCTACCAGTCACTTCAGGCGTGTGGCA | | |
| | | | TGGGTATTATCGCCAACGGCGATCTGCTCGACACCCTG | | |
| | | | CGCCGCGTGAAATGTTTCGGCGTACCGCTGGTCCGTAT | | |
| | | | TGATATCCGTCAGGAGAGCACGCGTCATACCGAAGCGC | | |
| | | | TGGGCGAGCTGACCCGCTACCTCGGTATCGGCGACTAC | | |
| | | | GAAAGCTGGTCAGAGGCCGACAAACAGGCGTTCCTGAT | | |
| | | | CCGCGAACTGAACTCCAAACGTCCGCTTCTGCCGCGCA | | |
| | | | ACTGGCAACCAAGCGCCGAAACGCGCGAAGTGCTCGAT | | |
| | | | ACCTGCCAGGTGATTGCCGAAGCACCGCAAGGCTCCAT | | |
| | | | TGCCGCCTACGTGATCTCGATGGCGAAAACGCCGTCCG | | |
| | | | ACGTACTGGCTGTCCACCTGCTGCTGAAAGAAGCGGGT | | |
| | | | ATCGGGTTTGCGATGCCGGTTGCTCCGCTGTTTGAAAC | | |
| | | | CCTCGATGATCTGAACAACGCCAACGATGTCATGACCC | | |
| | | | AGCTGCTCAATATTGACTGGTATCGTGGCCTGATTCAG | | |
| | | | GGCAAACAGATGGTGATGATTGGCTATTCCGACTCAGC | | |
| | | | AAAAGATGCGGGAGTGATGGCAGCTTCCTGGGCGCAAT | | |
| | | | ATCAGGCACAGGATGCATTAATCAAAACCTGCGAAAAA | | |
| | | | GCGGGTATTGAGCTGACGTTGTTCCACGGTCGCGGCGG | | |
| | | | TTCCATTGGTCGCGGCGGCGCACCTGCTCATGCGGCGC | | |
| | | | TGCTGTCACAACCGCCAGGAAGCCTGAAAGGCGGCCTG | | |
| | | | CGCGTAACCGAACAGGGCGAGATGATCCGCTTTAAATA | | |
| | | | TGGTCTGCCAGAAATCACCGTCAGCAGCCTGTCGCTTT | | |
| | | | ATACCGGGGCGATTCTGGAAGCCAACCTGCTGCCACCG | | |
| | | | CCGGAGCCGAAAGAGAGCTGGCGTCGCATTATGGATGA | | |
| | | | ACTGTCAGTCATCTCCTGCGATGTCTACCGCGGCTACG | | |
| | | | TACGTGAAAACAAAGATTTTGTGCCTTACTTCCGCTCC | | |
| | | | GCTACGCCGGAACAAGAACTGGGCAAACTGCCGTTGGG | | |
| | | | TTCACGTCCGGCGAAACGTCGCCCAACCGGCGGCGTCG | | |
| | | | AGTCACTACGCGCCATTCCGTGGATCTTCGCCTGGACG | | |
| | | | CAAAACCGTCTGATGCTCCCCGCCTGGCTGGGTGCAGG | | |
| | | | TACGGCGCTGCAAAAAGTGGTCGAAGACGGCAAACAGA | | |
| | | | GCGAGCTGGAGGCTATGTGCCGCGATTGGCCATTCTTC | | |
| | | | TCGACGCGTCTCGGCATGCTGGAGATGGTCTTCGCCAA | | |
| | | | AGCAGACCTGTGGCTGGCGGAATACTATGACCAACGCC | | |
| | | | TGGTAGACAAAGCACTGTGGCCGTTAGGTAAAGAGTTA | | |
| | | | CGCAACCTGCAAGAAGAAGACATCAAAGTGGTGCTGGC | | |
| | | | GATTGCCAACGATTCCCATCTGATGGCCGATCTGCCGT | | |
| | | | GGATTGCAGAGTCTATTCAGCTACGGAATATTTACACC | | |
| | | | GACCCGCTGAACGTATTGCAGGCCGAGTTGCTGCACCG | | |
| | | | CTCCCGCCAGGCAGAAAAAGAAGGCCAGGAACCGGATC | | |
| | | | CTCGCGTCGAACAAGCGTTAATGGTCACTATTGCCGGG | | |
| | | | ATTGCGGCAGGTATGCGTAATACCGGCTAA | | |
| pyc | Streptomyces | AL939105.1 | ATGGTCTCGTCACCCGGCAGGCTGAAGGGATCAAGAAT | 40 | |
| | coelicolor | | GTTCCGCAAGGTGCTGGTCGCCAACCGCGGTGAGATCG | | |
| | | | CGATCCGTGCGTTTCGGGCGGGCTACGAGCTCGGCGCG | | |
| | | | CGCACCGTCGCCGTCTTCCCGCACGAGGACCGCAATTC | | |
| | | | GCTGCACCGGCTCAAGGCCGACGAGGCCTACGAGATCG | | |
| | | | GGGAGCAGGGGCATCCCGTCCGCGCGTACCTCTCCGTG | | |
| | | | GAGGAGATCGTGCGCGCCGCCCGCCGTGCGGGGGCCGA | | |
| | | | CGCCGTCTACCCGGGCTACGGCTTCCTGTCCGAGAACC | | |
| | | | CCGAACTCGCCCGCGCCTGCGAGGAGGCCGGGATCACC | | |
| | | | TTCGTCGGTCCCAGCGCCCGGATCCTGGAACTGACCGG | | |
| | | | CAACAAGGCACGGGCCGTGGCCGCCGCCCGCGAGGCCG | | |
| | | | GAGTACCCGTGCTCGGCTCCTCGGCGCCCTCCACCGAC | | |
| | | | GTGGACGAACTCGTACGCGCCGCCGACGACGTCGGCTT | | |
| | | | CCCCGTGTTCGTCAAGGCGGTCGCGGGCGGCGGCGGGC | | |
| | | | GCGGCATGCGCCGCGTCGAGGAACCCGCCCAGCTGCGC | | |
| | | | GAGGCCATCGAGGCCGCCTCCCGCGAGGCCGCGTCCGC | | |
| | | | CTTCGGCGACTCCACCGTCTTCCTGGAGAAGGCGGTCG | | |
| | | | TCGAACCCCGCCACATCGAGGTGCAGATCCTCGCCGAC | | |
| | | | GGCGAGGGCGACGTCATCCACCTCTTCGAGCGGGACTG | | |
| | | | CTCGGTGCAGCGCCGCCACCAGAAGGTGATCGAGCTGG | | |
| | | | CGCCCGCGCCCAACCTCGACCCGGCCCTGCGGGAGCGG | | |
| | | | ATCTGCGCCGACGCCGTGAACTTCGCCCGGCAGATCGG | | |
| | | | CTACCGCAACGCGGGCACCGTCGAGTTCCTCGTCGACC | | |
| | | | GGGACGGCAACCACGTCTTCATCGAGATGAACCCGCGC | | |
| | | | ATCCAGGTCGAGCACACGGTCACCGAGGAGGTCACCGA | | |
| | | | CGTCGACCTGGTCCAGTCCCAGCTGCGCATCGCCGCCG | | |
| | | | GCCAGACGCTGGCCGACCTCGGACTCGCCCAGGAGAAC | | |
| | | | ATCACCCTGCGCGGTGCCGCACTCCAGTGCCGCATCAC | | |
| | | | CACCGAGGACCCGGCCAACGGCTTCCGCCCGGACACCG | | |
| | | | GGCAGATCAGCGCCTACCGTTCGCCGGGCGGCTCCGGC | | |
| | | | ATCCGGCTCGACGGCGGTACCACCCACGCCGGTACGGA | | |
| | | | GATCAGCGCGCACTTCGACTCGATGCTGGTCAAGCTCT | | |
| | | | CCTGCCGGGGACGGGACTTCACCACCGCGGTGAACCGC | | |
| | | | GCCCGGCGTGCGGTCGCCGAGTTCCGCATCCGCGGCGT | | |
| | | | CGCCACCAACATCCCCTTCCTCCAGGCGGTCCTGGACG | | |
| | | | ACCCCGACTTCCAGGCCGGCCGGGTCACCACCTCGTTC | | |
| | | | ATCGAACAGCGCCCGCACCTGCTGACCGCCCGGCACTC | | |
| | | | CGCCGACCGCGGCACCAAGCTGCTGACCTACCTCGCCG | | |
| | | | ACGTCACGGTGAACAAGCCGCACGGCGAGCGCCCCGAG | | |
| | | | CTGGTCGACCCGCTGACCAAGCTGCCGACGGCGTCCGC | | |
| | | | CGGTGAACCGCCCGCCGGGTCCCGCCAGTTGCTGGCCG | | |
| | | | AGCTGGGGCCGGAGGGGTTCGCCCGCCGACTGCGCGAG | | |
| | | | TCGTCCACCATCGGCGTCACCGACACCACCTTCCGCGA | | |
| | | | CGCCCACCAGTCGCTGCTCGCCACCCGGGTGCGCACCA | | |
| | | | AGGACATGCTCGCCGTGGCGCCCGTCGTCGCCCGCACC | | |
| | | | CTGCCCCAGCTGCTGTCCCTGGAGTGCTGGGGCGGCGC | | |
| | | | CACCTACGACGTCGCCCTGCGCTTCCTCGCCGAGGACC | | |
| | | | CCTGGGAGCGGCTAGCCGCGCTGCGCGAGGCGGTGCCC | | |
| | | | AACCTCTGCCTCCAGATGCTGCTGCGCGGCCGCAACAC | | |
| | | | CGTGGGCTACACCCCGTACCCGACCGAGGTGACCGACG | | |
| | | | CCTTCGTGCAGGAGGCCGCCGCCACCGGCATCGACATC | | |
| | | | TTCCGCATCTTCGACGCCCTCAACGACGTCGAGCAGAT | | |
| | | | GCGGCCCGCCATCGAGGCCGTACGGCAGACCGGCAGCG | | |
| | | | CCGTCGCCGAGGTCGCGCTCTGCTACACCGCCGACCTG | | |
| | | | TCCGACCCCTCCGAGCGGCTCTACACCCTCGACTACTA | | |
| | | | CCTGCGGCTCGCCGAGCAGATCGTGAACGCCGGAGCGC | | |
| | | | ACGTGCTGGCCGTCAAGGACATGGCCGGGCTGCTGCGC | | |
| | | | GCACCGGCCGCCGCGACCCTGGTGTCCGCGCTGCGCCG | | |
| | | | GGAGTTCGACCTGCCGGTGCACCTGCACACCCACGACA | | |
| | | | CCACCGGCGGCCAGCTCGCCACCTACCTGGCCGCGATC | | |
| | | | CAGGCGGGCGCGGACGCCGTCGACGGTGCGGTGGCGTC | | |
| | | | CATGGCGGGCACCACTTCGCAGCCGTCGCTGTCGGCGA | | |
| | | | TCGTGGCCGCCACCGACCACACCGAGCGGCCCACCGGC | | |
| | | | CTCGACCTCCAGGCCGTCGGCGACCTGGAGCCGTACTG | | |
| | | | GGAGAGCGTCCGCAAGGTCTACGCCCCGTTCGAGGCCG | | |
| | | | GCCTGGCCTCCCCGACCGGCCGGGTCTACCACCACGAG | | |
| | | | ATTCCCGGCGGCCAGCTCTCCAACCTGCGCACCCAGGC | | |
| | | | CGTCGCGCTCGGCCTCGGCGACCGCTTCGAGGACATCG | | |
| | | | AGGCCATGTACGCCGCCGCCGACCGGATGCTGGGCCGC | | |
| | | | CTGGTGAAGGTCACCCCGTCCTCCAAGGTGGTCGGCGA | | |
| | | | CCTGGCCCTGCATCTGGTGGGCGCCGGTGTCTCCCCGG | | |
| | | | CGGACTTCGAGCAGGACCCCGACCGGTTCGACATCCCG | | |
| | | | GACTCCGTGGTCGGCTTCCTGCGCGGCGAGCTGGGCAC | | |
| | | | CCCGCCCGGCGGCTGGCCCGAGCCGTTCCGCAGCAAGG | | |
| | | | CGCTGCGCGGCCGCGCCGAGGCCAGGCCGCTCGCCGAG | | |
| | | | CTGTCCGAGGACGACCGCGACGGCCTCGGCAAGGACCG | | |
| | | | CCGGGCGACGCTCAACCGGCTGCTGTTCCCGGGACCGG | | |
| | | | CCCGCGAGTTCGACACCCACCGCGCCTCGTACGGCGAC | | |
| | | | ACCAGCATCCTCGACAGCAAGGACTTCTTCTACGGGCT | | |
| | | | GCGCCCGGGCAAGGAGTACACGGTCGACCTCGACCCCG | | |
| | | | GCGTCCGGCTGCTCATCGAACTCCAGGCGGTCGGCGAC | | |
| | | | GCCGACGAGCGCGGCATGCGCACCGTGATGTCCTCCCT | | |
| | | | GAACGGACAGCTCCGCCCCATCCAGGTCCGCGACCGGT | | |
| | | | CGGCCGCCACCGACGTCCCGGTGACGGAGAAGGCCGAC | | |
| | | | CGGGCGAACCCCGGCCACGTCGCGGCGCCGTTCGCCGG | | |
| | | | TGTGGTGACCCTCGCCGTCGCCGAGGGCGACGAGGTGG | | |
| | | | AGGCCGGGGCCACCGTGGCCACCATCGAGGCGATGAAG | | |
| | | | ATGGAGGCGTCGATCACGGCCCCGAAGTCCGGCACGGT | | |
| | | | GACCAGGCTCGCCATCAACCGCATCCAGCAGGTCGAGG | | |
| | | | GCGGCGATCTTCTCGTCCAACTCGCC | | |
| pyc | Mycobacterium | AF262949 | GTGATCTCCAAGGTGCTCGTCGCCAACCGCGGCGAAAT | 41 | |
| | smegmatis | | CGCGATCCGCGCATTCCGTGCTGCGTACGAGATGGGCA | | |
| | | | TCGCCACGGTGGCGGTGTATCCGTACGAGGACCGGAAT | | |
| | | | TCGCTCCATCGGCTCAAGGCCGACGAGTCATATCAGAT | | |
| | | | CGGCGAGGTGGGTCATCCCGTCCGCGCGTATCTGTCGG | | |
| | | | TCGACGAGATCATCCGCGTCGCCAAGCATTCGGGCGCC | | |
| | | | GACGCGGTGTACCCGGGCTACGGCTTCCTGTCGGAGAA | | |
| | | | CCCCGATCTGGCGGCCAAGTGCGCCGAGGCGGGTATCA | | |
| | | | CGTTCGTGGGACCGTCCGCCGAGGTGCTGCAGCTCACG | | |
| | | | GGTAACAAGGCACGCGCGATCGCCGCGGCGCGCGCCGC | | |
| | | | GGGCCTTCCCGTGCTGAGTTCGTCGGAGCCGTCGTCGT | | |
| | | | CGGTGGACGAGTTGATGGCCGCTGCCGCCGACATGGAG | | |
| | | | TTCCCGCTGTTCGTCAAGGCGGTCTCGGGTGGCGGCGG | | |
| | | | GCGCGGCATGCGCCGCGTCACCGACCGCGAGTCCCTGG | | |
| | | | CCGAGGCGATCGAGGCGGCCTCGCGGGAGGCCGAGTCG | | |
| | | | GCGTTCGGCGACGCGTCGGTGTACCTGGAGCAGGCCGT | | |
| | | | GCTCAACCCGCGTCACATCGAGGTGCAGATCCTCGCCG | | |
| | | | ACGGCGCGGGCAACGTCATGCACCTGTTCGAGCGTGAC | | |
| | | | TGCAGCGTGCAGCGCAGGCATCAGAAGGTCGTCGAGCT | | |
| | | | GGCGCCCGCGCCCAACCTGAGTGACGAACTGCGCCAAC | | |
| | | | AGATCTGCGCCGACGCCGTGGCCTTCGCGCGCCAGATC | | |
| | | | GGGTACTCGTGCGCGGGCACCGTCGAGTTCCTGCTCGA | | |
| | | | CGAGCGCGGCCATCACGTGTTCATCGAGTGCAATCCGC | | |
| | | | GAATCCAGGTGGAGCACACGGTGACCGAGGAGATCACC | | |
| | | | GACGTGGACCTGGTGTCCTCGCAGTTGCGCATCGCCGC | | |
| | | | GGGCGAGACGCTCGCCGATCTCGGTCTGTCCCAGGACC | | |
| | | | GGCTCGTGGTGCGTGGCGCGGCCATGCAGTGCCGCATC | | |
| | | | ACCACCGAGGTCCCGGCCAACGGCTTCCGACCCGACAC | | |
| | | | CGGCCGCATCACCGCGTACCGCTCGCCGGGCGGCGCGG | | |
| | | | GCATCCGCCTCGACGGCGGCACCAACCTGGGTGCGGAG | | |
| | | | ATCTCGGCGCACTTCGACTCCATGCTGGTCAAGCTGAC | | |
| | | | GTGCCGGGGACGCGACTTCTCGGCCGCGGCCTCGCGCG | | |
| | | | CGCGCCGCGCCCTGGCGGAGTTCCGCATCCGCGGTGTG | | |
| | | | TCGACCAACATCCCGTTCCTGCAGGCGGTCATCGACGA | | |
| | | | TCCGGACTTCCGCGCCGGACGGGTGACGACGTCGTTCA | | |
| | | | TCGACGACCGGCCGCATCTATTGACCTCGCGGTCTCCT | | |
| | | | GCCGACCGCGGCACCAGGATCCTCAACTACCTGGCCGA | | |
| | | | CATCACGGTCAACAAGCCGCACGGCGAACGGCCTTCGA | | |
| | | | CGGTTTACCCGCAGGACAAGCTGCCGCCGCTGGATCTG | | |
| | | | CAGGCGCCGCCGCCCGCGGGATCCAAACAGCGCCTCGT | | |
| | | | GGAACTGGGGCCCGAGGGTTTCGCGGGCTGGCTGCGCG | | |
| | | | AATCCAAGGCCGTCGGCGTCACCGACACGACGTTCCGC | | |
| | | | GACGCGCACCAGTCGCTGCTGGCCACGCGTGTGCGCAC | | |
| | | | CACCGGTCTGCTGATGGTGGCGCCGTACGTCGCACGCT | | |
| | | | CCATGCCGCAGTTGCTGTCGATCGAGTGCTGGGGCGGC | | |
| | | | GCGACCTACGATGTGGCCCTTCGCTTCCTGAAGGAAGA | | |
| | | | CCCGTGGGAGCGGCTGGCGGCGCTGCGCGAGAGCGTGC | | |
| | | | CCAACATCTGCCTGCAGATGCTGCTGCGGGGACGCAAC | | |
| | | | ACCGTGGGCTACACGCCGTACCCGGAACTGGTCACCTC | | |
| | | | GGCGTTCGTCGAGGAGGCCGCGGCGACCGGTATCGACA | | |
| | | | TCTTCCGGATCTTCGACGCGCTCAACAACGTCGAGTCG | | |
| | | | ATGCGGCCCGCGATCGACGCGGTGCGGGAAACCGGTTC | | |
| | | | GACCATCGCCGAAGTCGCGATGTGCTACACGGGCGACC | | |
| | | | TCAGCGATCCCGCGGAGAACCTCTACACGCTCGACTAC | | |
| | | | TACCTGAAGCTGGCCGAGCAGATCGTCGAGGCCGGCGC | | |
| | | | CCACGTGCTGGCGATCAAGGACATGGCCGGTCTGCTGC | | |
| | | | GCGCCCCGGCCGCCCACACGCTCGTGAGCGCGTTGCGC | | |
| | | | AGCCGGTTCGATCTGCCCGTGCACGTGCACACCCACGA | | |
| | | | CACCCCGGGCGGTCAGCTCGCGACGTACCTCGCGGCGT | | |
| | | | GGTCGGCCGGCGCGGACGCGGTGGACGGCGCCTCGGCG | | |
| | | | CCGATGGCCGGGACCACGAGCCAGCCCGCGCTGAGCTC | | |
| | | | GATCGTCGCGGCGGCCGCGCACACCCAGTACGACACGG | | |
| | | | GCCTGGACCTGCGTGCGGTGTGCGACCTTGAGCCCTAC | | |
| | | | TGGGAGGCGGTGAGAAAGGTCTACGCGCCGTTCGAGTC | | |
| | | | CGGGCTGCCCGGGCCAACCGGCCGCGTCTACACCCACG | | |
| | | | AGATTCCCGGTGGGCAGTTGAGCAACCTGCGTCAGCAG | | |
| | | | GCCATCGCGTTGGGCCTCGGCGACCGGTTCGAGGAGAT | | |
| | | | CGAGGCCAATTACGCTGCGGCCGACCGGGTTCTGGGAC | | |
| | | | GGCTCGTGAAGGTGACCCCGTCGTCGAAGGTGGTCGGG | | |
| | | | GACCTGGCGCTGGCGCTCGTGGGTGCGGGCATCACCGC | | |
| | | | CGAGGAGTTCGCCGAGGATCCCGCGAAGTACGACATCC | | |
| | | | CCGACAGCGTGATCGGCTTCCTGCGCGGTGAACTCGGG | | |
| | | | GATCCGCCGGGCGGATGGCCGGAACCGTTGCGCACCAA | | |
| | | | GGCGCTCCAGGGCCGCGGACCGGCCCGGCCGGTCGAGA | | |
| | | | AGCTGACCGCCGACGACGAGGCGTTGCTCGCCCAGCCC | | |
| | | | GGGCCCAAGCGGCAGGCCGCGTTGAACCGCCTGCTTTT | | |
| | | | CCCCGGGCCCACCGCCGAGTTCGAGGCGCACCGCGAAA | | |
| | | | CCTACGGCGACACCTCATCCCTCAGCGCGAACCAGTTC | | |
| | | | TTCTACGGGCTGCGCTACGGCGAGGAGCACCGCGTGCA | | |
| | | | ACTCGAACGTGGCGTGGAACTGCTGATCGGGCTTGAGG | | |
| | | | CGATCTCGGAGGCCGACGAGCGCGGCATGCGCACCGTG | | |
| | | | ATGTGCATCATCAACGGTCAGCTGCGCCCGGTTCTCGT | | |
| | | | GCGCGACCGCAGCATCGCCAGCGAGGTGCCCGCCGCCG | | |
| | | | AAAAGGCCGACCGCAACAATGCCGACCACATCGCCGCG | | |
| | | | CCCTTCGCCGGTGTGGTGACCGTCGGTGTCGCAGAAGG | | |
| | | | TGACTCGGTGGACGCGGGACAAACCATCGCGACGATCG | | |
| | | | AGGCGATGAAGATGGAGGCCGCCATCACCGCGCCCAAG | | |
| | | | GCAGGCACCGTCGCGCGCGTCGCGGTCGCGGCGACCGC | | |
| | | | CCAGGTCGAGGGCGGCGATCTGCTGGTGGTGGTCAGCT | | |
| | | | GA | | |
| pyc | Coryne- | Y09548 | GTGTCGACTCACACATCTTCAACGCTTCCAGCATTCAA | 244 | |
| | bacterium | | AAAGATCTTGGTAGCAAACCGCGGCGAAATCGCGGTCC | | |
| | glutamicum | | GTGCTTTCCGTGCAGCACTCGAAACCGGTGCAGCCACG | | |
| | | | GTAGCTATTTACCCCCGTGAAGATCGGGGATCATTCCA | | |
| | | | CCGCTCTTTTGCTTCTGAAGCTGTCCGCATTGGTACCG | | |
| | | | AAGGCTCACCAGTCAAGGCGTACCTGGACATCGATGAA | | |
| | | | ATTATCGGTGCAGCTAAAAAAGTTAAAGCAGATGCCAT | | |
| | | | TTACCCGGGATACGGCTTCCTGTCTGAAAATGCCCAGC | | |
| | | | TTGCCCGCGAGTGTGCGGAAAACGGCATTACTTTTATT | | |
| | | | GGCCCAACCCCAGAGGTTCTTGATCTCACCGGTGATAA | | |
| | | | GTCTCGCGCGGTAACCGCCGCGAAGAAGGCTGGTCTGC | | |
| | | | CAGTTTTGGCGGAATCCACCCCGAGCAAAAACATCGAT | | |
| | | | GAGATCGTTAAAAGCGCTGAAGGCCAGACTTACCCCAT | | |
| | | | CTTTGTGAAGGCAGTTGCCGGTGGTGGCGGACGCGGTA | | |
| | | | TGCGTTTTGTTGCTTCACCTGATGAGCTTCGCAAATTA | | |
| | | | GCAACAGAAGCATCTCGTGAAGCTGAAGCGGCTTTCGG | | |
| | | | CGATGGCGCGGTATATGTCGAACGTGCTGTGATTAACC | | |
| | | | CTCAGCATATTGAAGTGCAGATCCTTGGCGATCACACT | | |
| | | | GGAGAAGTTGTACACCTTTATGAACGTGACTGCTCACT | | |
| | | | GCAGCGTCGTCACCAAAAAGTTGTCGAAATTGCGCCAG | | |
| | | | CACAGCATTTGGATCCAGAACTGCGTGATCGCATTTGT | | |
| | | | GCGGATGCAGTAAAGTTCTGCCGCTCCATTGGTTACCA | | |
| | | | GGGCGCGGGAACCGTGGAATTCTTGGTCGATGAAAAGG | | |
| | | | GCAACCACGTCTTCATCGAAATGAACCCACGTATCCAG | | |
| | | | GTTGAGCACACCGTGACTGAAGAAGTCACCGAGGTGGA | | |
| | | | CCTGGTGAAGGCGCAGATGCGCTTGGCTGCTGGTGCAA | | |
| | | | CCTTGAAGGAATTGGGTCTGACCCAAGATAAGATCAAG | | |
| | | | ACCCACGGTGCAGCACTGCAGTGCCGCATCACCACGGA | | |
| | | | AGATCCAAACAACGGCTTCCGCCCAGATACCGGAACTA | | |
| | | | TCACCGCGTACCGCTCACCAGGCGGAGCTGGCGTTCGT | | |
| | | | CTTGACGGTGCAGCTCAGCTCGGTGGCGAAATCACCGC | | |
| | | | ACACTTTGACTCCATGCTGGTGAAAATGACCTGCCGTG | | |
| | | | GTTCCGACTTTGAAACTGCTGTTGCTCGTGCACAGCGC | | |
| | | | GCGTTGGCTGAGTTCACCGTGTCTGGTGTTGCAACCAA | | |
| | | | CATTGGTTTCTTGCGTGCGTTGCTGCGGGAAGAGGACT | | |
| | | | TCACTTCCAAGCGCATCGCCACCGGATTCATTGCCGAT | | |
| | | | CACCCGCACCTCCTTCAGGCTCCACCTGCTGATGATGA | | |
| | | | GCAGGGACGCATCCTGGATTACTTGGCAGATGTCACCG | | |
| | | | TGAACAAGCCTCATGGTGTGCGTCCAAAGGATGTTGCA | | |
| | | | GCTCCTATCGATAAGCTGCCTAACATCAAGGATCTGCC | | |
| | | | ACTGCCACGCGGTTCCCGTGACCGCCTGAAGCAGCTTG | | |
| | | | GCCCAGCCGCGTTTGCTCGTGATCTCCGTGAGCAGGAC | | |
| | | | GCACTGGCAGTTACTGATACCACCTTCCGCGATGCACA | | |
| | | | CCAGTCTTTGCTTGCGACCCGAGTCCGCTCATTCGCAC | | |
| | | | TGAAGCCTGCGGCAGAGGCCGTCGCAAAGCTGACTCCT | | |
| | | | GAGCTTTTGTCCGTGGAGGCCTGGGGCGGCGCGACCTA | | |
| | | | CGATGTGGCGATGCGTTTCCTCTTTGAGGATCCGTGGG | | |
| | | | ACAGGCTCGACGAGCTGCGCGAGGCGATGCCGAATGTA | | |
| | | | AACATTCAGATGCTGCTTCGCGGCCGCAACACCGTGGG | | |
| | | | ATACACCCCGTACCCAGACTCCGTCTGCCGCGCGTTTG | | |
| | | | TTAAGGAAGCTGCCAGCTCCGGCGTGGACATCTTCCGC | | |
| | | | ATCTTCGACGCGCTTAACGACGTCTCCCAGATGCGTCC | | |
| | | | AGCAATCGACGCAGTCCTGGAGACCAACACCGCGGTAG | | |
| | | | CCGAGGTGGCTATGGCTTATTCTGGTGATCTCTCTGAT | | |
| | | | CCAAATGAAAAGCTCTACACCCTGGATTACTACCTAAA | | |
| | | | GATGGCAGAGGAGATCGTCAAGTCTGGCGCTCACATCT | | |
| | | | TGGCCATTAAGGATATGGCTGGTCTGCTTCGCCCAGCT | | |
| | | | GCGGTAACCAAGCTGGTCACCGCACTGCGCCGTGAATT | | |
| | | | CGATCTGCCAGTGCACGTGCACACCCACGACACTGCGG | | |
| | | | GTGGCCAGCTGGCAACCTACTTTGCTGCAGCTCAAGCT | | |
| | | | GGTGCAGATGCTGTTGACGGTGCTTCCGCACCACTGTC | | |
| | | | TGGCACCACCTCCCAGCCATCCCTGTCTGCCATTGTTG | | |
| | | | CTGCATTCGCGCACACCCGTCGCGATACCGGTTTGAGC | | |
| | | | CTCGAGGCTGTTTCTGACCTCGAGCCGTACTGGGAAGC | | |
| | | | AGTGCGCGGACTGTACCTGCCATTTGAGTCTGGAACCC | | |
| | | | CAGGCCCAACCGGTCGCGTCTACCGCCACGAAATCCCA | | |
| | | | GGCGGACAGTTGTCCAACCTGCGTGCACAGGCCACCGC | | |
| | | | ACTGGGCCTTGCGGATCGTTTCGAACTCATCGAAGACA | | |
| | | | ACTACGCAGCCGTTAATGAGATGCTGGGACGCCCAACC | | |
| | | | AAGGTCACCCCATCCTCCAAGGTTGTTGGCGACCTCGC | | |
| | | | ACTCCACCTCGTTGGTGCGGGTGTGGATCCAGCAGACT | | |
| | | | TTGCTGCCGATCCACAAAAGTACGACATCCCAGACTCT | | |
| | | | GTCATCGCGTTCCTGCGCGGCGAGCTTGGTAACCCTCC | | |
| | | | AGGTGGCTGGCCAGAGCCACTGCGCACCCGCGCACTGG | | |
| | | | AAGGCCGCTCCGAAGGCAAGGCACCTCTGACGGAAGTT | | |
| | | | CCTGAGGAAGAGCAGGCGCACCTCGACGCTGATGATTC | | |
| | | | CAAGGAACGTCGCAATAGCCTCAACCGCCTGCTGTTCC | | |
| | | | CGAAGCCAACCGAAGAGTTCCTCGAGCACCGTCGCCGC | | |
| | | | TTCGGCAACACCTCTGCGCTGGATGATCGTGAATTCTT | | |
| | | | CTACGGCCTGGTCGAAGGCCGCGAGACTTTGATCCGCC | | |
| | | | TGCCAGATGTGCGCACCCCACTGCTTGTTCGCCTGGAT | | |
| | | | GCGATCTCTGAGCCAGACGATAAGGGTATGCGCAATGT | | |
| | | | TGTGGCCAACGTCAACGGCCAGATCCGCCCAATGCGTG | | |
| | | | TGCGTGACCGCTCCGTTGAGTCTGTCACCGCAACCGCA | | |
| | | | GAAAAGGCAGATTCCTCCAACAAGGGCCATGTTGCTGC | | |
| | | | ACCATTCGCTGGTGTTGTCACCGTGACTGTTGCTGAAG | | |
| | | | GTGATGAGGTCAAGGCTGGAGATGCAGTCGCAATCATC | | |
| | | | GAGGCTATGAAGATGGAAGCAACAATCACTGCTTCTGT | | |
| | | | TGACGGCAAAATCGATCGCGTTGTGGTTCCTGCTGCAA | | |
| | | | CGAAGGTGGAAGGTGGCGACTTGATCGTCGTCGTTTCC | | |
| | | | TAA | | |
| dapA | Thermobifida | NZ_AAAQQ10 | ATGGTAGGCAGTACGACGCCGAACGCGCCCTTCGGCCA | 42 | |
| | fusca | 00040.1 | GATGTTGACCGCGATGATCACCCCCATGCTCGACAATG | | |
| | | | GGGAGGTGGACTACGACGGGGTGGCCCGCCTCGCGACC | | |
| | | | TACCTCGTCGATGAGCAGCGCAACGACGGCCTCATCGT | | |
| | | | CAACGGAACCACCGGAGAGTCCGCCACCACCAGCGATG | | |
| | | | AGGAGAAGGAGCGCATCCTCCGCACCGTGATCGACGCG | | |
| | | | GTCGGCGACCGCGCCACCATCGTTGCCGGAGCGGGCAG | | |
| | | | CAACGACACCAGGCACAGTATTGAACTCGCGCGGACCG | | |
| | | | CGGAACGCGCCGGAGCAGACGGCCTGCTGCTCGTCACC | | |
| | | | CCCTACTACAACCGGCCGCCCCAAGAAGGCCTGCTGCG | | |
| | | | GCACTTCACGGCCATTGCCGACGCCACAGGGCTGCCGA | | |
| | | | TCATGCTCTACGACATTCCTGGCCGCACAGGCACGCCG | | |
| | | | ATCGACTCCGAAACCCTGGTCCGGCTCGCCGAGCACCC | | |
| | | | CCGCATCGTCGCCAACAAGGACGCCAAAGACGACCTCG | | |
| | | | GCGCCAGCTCGTGGGTGATGTCCCGCACCGACCTCGCC | | |
| | | | TACTACAGCGGCAGCGACATGCTCAACCTGCCGCTGCT | | |
| | | | GTCCATCGGCGCCGCGGGCTTCGTCAGCGTGGTCGGCC | | |
| | | | ATGTCGTCGGCTCCGAACTGCACGACATGATCGACGCC | | |
| | | | TACCGGGCCGGGGACGTGGCCCGGGCTTTGGACATCCA | | |
| | | | CCGCCGCCTGATCCCCGTCTACCGGGGCATGTTCCGCA | | |
| | | | CCCAGGGAGTCATCACCACTAAGGCGGTGCTCGCCATG | | |
| | | | TTCGGGCTGCCCGCCGGAGTGGTCCGCGCCCCCCTGCT | | |
| | | | CGACGCGTCCCCCGAACTCAAAGAGCTGCTCCGCGAAG | | |
| | | | ACCTCGCCATGGCCGGGGTGAAGGGCCCCACTGGCCTT | | |
| | | | GCCTCCGCTCACGAGGACGCGGCCAGCGGGAGGGAAGC | | |
| | | | GGAACGACTCACGGAGGGGACCGCA | | |
| dapA | Mycobacterium | AL583922.1 | GTGACCACTGTCGGATTCGACGTCCCCGCACGTTTGGG | 43 | |
| | leprae (can be | | GACCCTGCTTACTGCGATGGTGACACCGTTTGACGCTG | | |
| | used to clone | | ATGGTTCTGTTGACACTGCGGCTGCGACGCGGCTGGCG | | |
| | M. smegmatis | | AACCGCCTGGTCGACGCGGGTTGTGATGGTCTGGTGCT | | |
| | gene) | | CTCGGGCACCACCGGCGAGTCGCCGACCACTACTGACG | | |
| | | | ACGAGAAACTCCAACTGTTGCGTGTCGTACTTGAGGCG | | |
| | | | GTAGGTGACCGAGCTAGAGTCATCGCCGGCGCAGGTAG | | |
| | | | TTATGACACAGCTCATAGTGTCCGACTCGTCAAGGCCT | | |
| | | | GTGCGGGTGAGGGCGCGCACGGACTTCTGGTGGTTACC | | |
| | | | CCTTACTACTCGAAGCCGCCGCAGACCGGGCTGTTTGC | | |
| | | | GCACTTCACCGCTGTGGCCGACGCGACTGAGCTACCAG | | |
| | | | TGTTGCTCTACGACATTCCCGGGCGGTCGGTCGTGCCG | | |
| | | | ATCGAGCCTGACACGATTCGCGCGCTGGCGTCGCATCC | | |
| | | | CAACATCGTCGGAGTCAAAGAGGCCAAGGCTGATTTAT | | |
| | | | ACAGCGGTGCCCGGATCATGGCTGACACCGGCCTGGCC | | |
| | | | TACTATTCCGGCGACGACGCACTGAACCTGCCCTGGCT | | |
| | | | GGCGGTGGGTGCCATCGGCTTCATCAGTGTGATTTCTC | | |
| | | | ATCTAGCCGCAGGACAGCTTCGAGAGCTGTTATCCGCT | | |
| | | | TTTGGTTCTGGGGATATTACCACTGCCCGAAAGATCAA | | |
| | | | CGTCGCGATCGGCCCGCTGTGCAGCGCGATGGACCGCT | | |
| | | | TGGGTGGGGTGACGATGTCCAAGGCAGGTCTGCGGCTT | | |
| | | | CAGGGTATCGACGTCGGTGATCCGCGGTTGCCGCAGAT | | |
| | | | GCCGGCAACAGCGGAGCAGATCGATGAGTTGGCTGTCG | | |
| | | | ATATGCGTGCAGCCTCGGTGCTTAGG | | |
| dapA | Mycobacterium | AL008967.1 | GTGACCACCGTCGGATTCGACGTCGCAGCGCGCCTAGG | 44 | |
| | tuberculosis | | AACCCTGCTGACCGCGATGGTGACACCGTTTAGCGGCG | | |
| | (can be used to | | ATGGCTCCCTGGACACCGCCACCGCGGCGCGGCTGGCC | | |
| | clone M. | | AACCACCTGGTCGATCAGGGGTGCGACGGTCTGGTGGT | | |
| | smegmatis | | CTCGGGCACCACCGGCGAGTCGCCGACCACCACCGACG | | |
| | gene) | | GGGAGAAAATCGAGCTGCTGCGGGCCGTCTTGGAAGCG | | |
| | | | GTGGGGGACCGGGCCCGTGTTATCGCCGGTGCCGGCAC | | |
| | | | CTATGACACCGCGCACAGCATCCGGCTGGCCAAGGCTT | | |
| | | | GTGCGGCCGAGGGTGCGCACGGGCTGCTGGTGGTCACG | | |
| | | | CCCTACTATTCCAAGCCGCCGCAGCGGGGGCTGCAAGC | | |
| | | | CCATTTCACCGCCGTCGCCGACGCGACCGAGCTGCCGA | | |
| | | | TGCTGCTCTATGACATCCCGGGGCGGTCGGCGGTGCCG | | |
| | | | ATCGAGCCCGACACGATCCGCGCGTTGGCGTCGCATCC | | |
| | | | GAACATCGTCGGAGTCAAGGACGCCAAAGCCGACCTGC | | |
| | | | ACAGCGGCGCCCAAATCATGGCCGACACCGGACTGGCC | | |
| | | | TACTATTCCGGCGACGACGCGCTCAACCTGCCCTGGCT | | |
| | | | GGCCATGGGCGCCACGGGCTTCATCAGCGTGATTGCCC | | |
| | | | ACCTGGCAGCCGGGCAGCTTCGAGAGTTGTTGTCCGCC | | |
| | | | TTCGGTTCTGGGGATATCGCCACCGCCCGCAAGATCAA | | |
| | | | CATTGCGGTCGCCCCGCTGTGCAACGCGATGAGCCGCC | | |
| | | | TGGGTGGGGTGACGTTGTCCAAGGCGGGCTTGCGGCTG | | |
| | | | CAGGGCATCGACGTCGGTGATCCCCGGCTGCCCCAGGT | | |
| | | | GGCCGCGACACCGGAGCAGATCGACGCGTTGGCCGCCG | | |
| | | | ACATGCGCGCGGCCTCGGTGCTTCGG | | |
| dapA | Streptomyces | AL939124.1 | ATGGCTCCGACCTCCACTCCGCAGACCCCCTTCGGGCG | 45 | |
| | coelicolor | | GGTCCTCACCGCCATGGTCACGCCCTTCACGGCGGACG | | |
| | | | GCGCACTCGACCTCGACGGCGCCCAGCGGCTCGCCGCC | | |
| | | | CACCTGGTGGACGCAGGCAACGACGGCCTGATCATCAA | | |
| | | | CGGCACCACCGGCGAGTCCCCGACCACCAGCGACGCGG | | |
| | | | AGAAAGCGGACCTCGTACGGGCCGTCGTGGAGGCGGTC | | |
| | | | GGCGACCGGGCGCACGTGGTGGCCGGAGTCGGCACCAA | | |
| | | | CAACACCCAGCACAGCATCGAGCTGGCCCGCGCCGCCG | | |
| | | | AGCGCGTCGGCGCCCACGGCCTGCTGCTCGTCACGCCG | | |
| | | | TACTACAACAAGCCCCCGCAGGAGGGCCTGTACCTGCA | | |
| | | | CTTCACGGCCATCGCCGACGCCGCCGGGCTGCCGGTCA | | |
| | | | TGCTCTACGACATCCCCGGCCGCAGCGGCGTCCCGATC | | |
| | | | AACACCGAGACCCTGGTCCGCCTCGCGGAGCACCCGCG | | |
| | | | GATCGTCGCCAACAAGGACGCCAAGGGCGACCTCGGCC | | |
| | | | GGGCCAGCTGGGCCATCGCGCGCTCCGGCCTCGCCTGG | | |
| | | | TACTCCGGCGACGACATGCTCAACCTGCCGCTGCTCGC | | |
| | | | CGTGGGCGCGGTCGGCTTCGTCTCCGTCGTGGGCCACG | | |
| | | | TCGTCACCCCGGAGCTGCGCGCCATGGTGGACGCGCAC | | |
| | | | GTCGCCGGTGACGTACAGAAGGCCCTGGAGATCCACCA | | |
| | | | GAAGCTGCTCCCCGTCTTCACCGGCATGTTCCGCACCC | | |
| | | | AGGGCGTCATGACCACCAAGGGCGCGCTCGCCCTCCAG | | |
| | | | GGACTGCCCGCGGGACCGCTGCGCGCCCCCATGGTCGG | | |
| | | | CCTCACGCCCGAGGAAACCGAGCAGCTCAAGATCGATC | | |
| | | | TTGCCGCCGGCGGGGTACAGCTC | | |
| dapA | Erwinia | | ATGTTTACGGGTAGTATTGTTGCTCTGGTTACGCCGAT | 46 | |
| | chrysanthemi | | GGACGACAAAGGTGCCGTTGATCGCGCGAGCTTGAAAA | | |
| | | | AACTGATTGATTATCATGTCGCTAGCGGAACTTCCGCG | | |
| | | | ATTGTGTCGGTGGGTACCACCGGCGAATCCGCCACCTT | | |
| | | | GAGTCACGATGAGCATGGCGACGTGGTGATGCTGACGC | | |
| | | | TGGAATTGAGCGATGGCCGCATCCCGGTCATCGCCGGC | | |
| | | | ACCGGCGCCAATTCGACCGCTGAGGCGATTTCCCTCAC | | |
| | | | CCAGCGTTTCAACGACACGGGCGTGGCCGGGTGCCTGA | | |
| | | | CCGTGACGCCGTATTACAATAAGCCGACCCAAAACGGC | | |
| | | | TTGTTCCTGCACTTCAAGGCGATTGCCGAGCACACCGA | | |
| | | | CCTGCCGCAAATCCTCTACAACGTGCCGTCCCGTACCG | | |
| | | | GTTGCGACATGTTGCCGGAAACCGTCGCCCGTCTGTCG | | |
| | | | GAAATCAAAAATATTGTCGCAATCAAGGAAGCGACCGG | | |
| | | | GAACTTAAGCCGGGTCAGTCAGATCCAAGAGCTGGTTC | | |
| | | | ATGAAGATTTCATTTTGCTGAGCGGCGACGACGCCAGC | | |
| | | | TCGCTGGACTTCATGCAACTGGGTGGCGACGGCGTGAT | | |
| | | | TTCCGTGACAGCCAACATCGCGGCCCGCGAAATGGCGG | | |
| | | | CGCTGTGCGAGCTGGCGGCGCAAGGGAATTTCGTTGAA | | |
| | | | GCCCGCCGTCTGAATCAGCGTCTGATGCCGCTGCATCA | | |
| | | | GAAACTGTTTGTTGAACCCAATCCGATTCCGGTGAAAT | | |
| | | | GGGCCTGTAAGGCATTGGGATTGATGGCGACCGACACG | | |
| | | | CTTCGTCTGCCGATGACGCCGCTGACCGATGCCGGTCG | | |
| | | | CGACGTGATGGAGCAGGCCATGAAGCAGGCGGGTCTGC | | |
| | | | TGTAA | | |
| dapA | Coryne- | X53993 | ATGAGCACAGGTTTAACAGCTAAGACCGGAGTAGAGCA | 128 | |
| | bacterium | | CTTCGGCACCGTTGGAGTAGCAATGGTTACTCCATTCA | | |
| | glutamicum | | CGGAATCCGGAGACATCGATATCGCTGCTGGCCGCGAA | | |
| | | | GTCGCGGCTTATTTGGTTGATAAGGGCTTGGATTCTTT | | |
| | | | GGTTCTCGCGGGCACCACTGGTGAATCCCCAACGACAA | | |
| | | | CCGCCGCTGAAAAACTAGAACTGCTCAAGGCCGTTCGT | | |
| | | | GAGGAAGTTGGGGATCGGGCGAAGCTCATCGCCGGTGT | | |
| | | | CGGAACCAACAACACGCGGACATCTGTGGAACTTGCGG | | |
| | | | AAGCTGCTGCTTCTGCTGGCGCAGACGGCCTTTTAGTT | | |
| | | | GTAACTCCTTATTACTCCAAGCCGAGCCAAGAGGGATT | | |
| | | | GCTGGCGCACTTCGGTGCAATTGCTGCAGCAACAGAGG | | |
| | | | TTCCAATTTGTCTCTATGACATTCCTGGTCGGTCAGGT | | |
| | | | ATTCCAATTGAGTCTGATACCATGAGACGCCTGAGTGA | | |
| | | | ATTACCTACGATTTTGGCGGTCAAGGACGCCAAGGGTG | | |
| | | | ACCTCGTTGCAGCCACGTCATTGATCAAAGAAACGGGA | | |
| | | | CTTGCCTGGTATTCAGGCGATGACCCACTAAACCTTGT | | |
| | | | TTGGCTTGCTTTGGGCGGATCAGGTTTCATTTCCGTAA | | |
| | | | TTGGACATGCAGCCCCCACAGCATTACGTGAGTTGTAC | | |
| | | | ACAAGCTTCGAGGAAGGCGACCTCGTCCGTGCGCGGGA | | |
| | | | AATCAACGCCAAACTATCACCGCTGGTAGCTGCCCAAG | | |
| | | | GTCGCTTGGGTGGAGTCAGCTTGGCAAAAGCTGCTTCG | | |
| | | | CGTCTGCAGGGCATCAACGTAGGAGATCCTCGACTTCC | | |
| | | | AATTATGGCTCCAAATGAGCAGGAACTTGAGGCTCTCC | | |
| | | | GAGAAGACATGAAAAAAGCTGGAGTTCTATAA | | |
| dapA | Escherichia | | ATGTTCACGGGAAGTATTGTCGCGATTGTTACTCCGAT | 129 | |
| | coli | | GGATGAAAAAGGTAATGTCTGTCGGGCTAGCTTGAAAA | | |
| | | | AACTGATTGATTATCATGTCGCCAGCGGTACTTCGGCG | | |
| | | | ATCGTTTCTGTTGGCACCACTGGCGAGTCCGCTACCTT | | |
| | | | AAATCATGACGAACATGCTGATGTGGTGATGATGACGC | | |
| | | | TGGATCTGGCTGATGGGCGCATTCCGGTAATTGCCGGG | | |
| | | | ACCGGCGCTAACGCTACTGCGGAAGCCATTAGCCTGAC | | |
| | | | GCAGCGCTTCAATGACAGTGGTATCGTCGGCTGCCTGA | | |
| | | | CGGTAACCCCTTACTACAATCGTCCGTCGCAAGAAGGT | | |
| | | | TTGTATCAGCATTTCAAAGCCATCGCTGAGCATACTGA | | |
| | | | CCTGCCGCAAATTCTGTATAATGTGCCGTCCCGTACTG | | |
| | | | GCTGCGATCTGCTCCCGGAAACGGTGGGCCGTCTGGCG | | |
| | | | AAAGTAAAAAATATTATCGGAATCAAAGAGGCAACAGG | | |
| | | | GAACTTAACGCGTGTAAACCAGATCAAAGAGCTGGTTT | | |
| | | | CAGATGATTTTGTTCTGCTGAGCGGCGATGATGCGAGC | | |
| | | | GCGCTGGACTTCATGCAATTGGGCGGTCATGGGGTTAT | | |
| | | | TTCCGTTACGACTAACGTCGCAGCGCGTGATATGGCCC | | |
| | | | AGATGTGCAAACTGGCAGCAGAAGAACATTTTGCCGAG | | |
| | | | GCACGCGTTATTAATCAGCGTCTGATGCCATTACACAA | | |
| | | | CAAACTATTTGTCGAACCCAATCCAATCCCGGTGAAAT | | |
| | | | GGGCATGTAAGGAACTGGGTCTTGTGGCGACCGATACG | | |
| | | | CTGCGCCTGCCAATGACACCAATCACCGACAGTGGTCG | | |
| | | | TGAGACGGTCAGAGCGGCGCTTAAGCATGCCGGTTTGC | | |
| | | | TGTAA | | |
| dapA | Coryne- | X53993 | ATGAGCACAGGTTTAACAGCTAAGACCGGAGTAGAGCA | 245 | |
| | bacterium | | CTTCGGCACCGTTGGAGTAGCAATGGTTACTCCATTCA | | |
| | glutamicum | | CGGAATCCGGAGACATCGATATCGCTGCTGGCCGCGAA | | |
| | | | GTCGCGGCTTATTTGGTTGATAAGGGCTTGGATTCTTT | | |
| | | | GGTTCTCGCGGGCACCACTGGTGAATCCCCAACGACAA | | |
| | | | CCGCCGCTGAAAAACTAGAACTGCTCAAGGCCGTTCGT | | |
| | | | GAGGAAGTTGGGGATCGGGCGAAGCTCATCGCCGGTGT | | |
| | | | CGGAACCAACAACACGCGGACATCTGTGGAACTTGCGG | | |
| | | | AAGCTGCTGCTTCTGCTGGCGCAGACGGCCTTTTAGTT | | |
| | | | GTAACTCCTTATTACTCCAAGCCGAGCCAAGAGGGATT | | |
| | | | GCTGGCGCACTTCGGTGCAATTGCTGCAGCAACAGAGG | | |
| | | | TTCCAATTTGTCTCTATGACATTCCTGGTCGGTCAGGT | | |
| | | | ATTCCAATTGAGTCTGATACCATGAGACGCCTGAGTGA | | |
| | | | ATTACCTACGATTTTGGCGGTCAAGGACGCCAAGGGTG | | |
| | | | ACCTCGTTGCAGCCACGTCATTGATCAAAGAAACGGGA | | |
| | | | CTTGCCTGGTATTCAGGCGATGACCCACTAAACCTTGT | | |
| | | | TTGGCTTGCTTTGGGCGGATCAGGTTTCATTTCCGTAA | | |
| | | | TTGGACATGCAGCCCCCACAGCATTACGTGAGTTGTAC | | |
| | | | ACAAGCTTCGAGGAAGGCGACCTCGTCCGTGCGCGGGA | | |
| | | | AATCAACGCCAAACTATCACCGCTGGTAGCTGCCCAAG | | |
| | | | GTCGCTTGGGTGGAGTCAGCTTGGCAAAAGCTGCTTCG | | |
| | | | CGTCTGCAGGGCATCAACGTAGGAGATCCTCGACTTCC | | |
| | | | AATTATGGCTCCAAATGAGCAGGAACTTGAGGCTCTCC | | |
| | | | GAGAAGACATGAAAAAAGCTGGAGTTCTATAA | | |
| dapA | Escherichia | M12844 | ATGTTCACGGGAAGTATTGTCGCGATTGTTACTCCGAT | 246 | |
| | coli | | GGATGAAAAAGGTAATGTCTGTCGGGCTAGCTTGAAAA | | |
| | | | AACTGATTGATTATCATGTCGCCAGCGGTACTTCGGCG | | |
| | | | ATCGTTTCTGTTGGCACCACTGGCGAGTCCGCTACCTT | | |
| | | | AAATCATGACGAACATGCTGATGTGGTGATGATGACGC | | |
| | | | TGGATCTGGCTGATGGGCGCATTCCGGTAATTGCCGGG | | |
| | | | ACCGGCGCTAACGCTACTGCGGAAGCCATTAGCCTGAC | | |
| | | | GCAGCGCTTCAATGACAGTGGTATCGTCGGCTGCCTGA | | |
| | | | CGGTAACCCCTTACTACAATCGTCCGTCGCAAGAAGGT | | |
| | | | TTGTATCAGCATTTCAAAGCCATCGCTGAGCATACTGA | | |
| | | | CCTGCCGCAAATTCTGTATAATGTGCCGTCCCGTACTG | | |
| | | | GCTGCGATCTGCTCCCGGAAACGGTGGGCCGTCTGGCG | | |
| | | | AAAGTAAAAAATATTATCGGAATCAAAGAGGCAACAGG | | |
| | | | GAACTTAACGCGTGTAAACCAGATCAAAGAGCTGGTTT | | |
| | | | CAGATGATTTTGTTCTGCTGAGCGGCGATGATGCGAGC | | |
| | | | GCGCTGGACTTCATGCAATTGGGCGGTCATGGGGTTAT | | |
| | | | TTCCGTTACGACTAACGTCGCAGCGCGTGATATGGCCC | | |
| | | | AGATGTGCAAACTGGCAGCAGAAGAACATTTTGCCGAG | | |
| | | | GCACGCGTTATTAATCAGCGTCTGATGCCATTACACAA | | |
| | | | CAAACTATTTGTCGAACCCAATCCAATCCCGGTGAAAT | | |
| | | | GGGCATGTAAGGAACTGGGTCTTGTGGCGACCGATACG | | |
| | | | CTGCGCCTGCCAATGACACCAATCACCGACAGTGGTCG | | |
| | | | TGAGACGGTCAGAGCGGCGCTTAAGCATGCCGGTTTGC | | |
| | | | TGTAA | | |
| hom | Streptomyces | AL939123.1 | ATGATGCGTACGCGTCCGCTGAAGGTGGCGCTGCTGGG | 47 | |
| | coelicolor | | CTGTGGAGTGGTCGGCTCAAAGGTGGCGCGCATCATGA | | |
| | | | CGACGCACGCCGCCGACCTCGCCGCCCGGATCGGGGCC | | |
| | | | CCGGTGGAGCTCGCGGGCGTCGCCGTACGGCGGCCCGA | | |
| | | | CAAGGTGCGGGAGGGGATCGACCCGGCCCTCGTCACCA | | |
| | | | CCGACGCCACCGCGCTCGTCAAGCGCGGGGACATCGAC | | |
| | | | GTCGTCGTCGAGGTCATCGGGGGGATCGAGCCCGCGCG | | |
| | | | GACGCTCATCACCACCGCCTTCGCGCACGGCGCCTCCG | | |
| | | | TGGTCTCCGCCAACAAGGCGCTCATCGCCCAGGACGGC | | |
| | | | GCCGCCCTGCACGCCGCCGCCGACGAGCACGGCAAGGA | | |
| | | | CCTGTACTACGAGGCCGCCGTCGCCGGTGCCATCCCGC | | |
| | | | TGATCCGGCCGCTGCGCGAGTCCCTCGCCGGCGACAAG | | |
| | | | GTCAACCGGGTGCTCGGCATCGTCAACGGGACCACCAA | | |
| | | | CTTCATCCTCGACGCCATGGACTCGACCGGGGCCGGCT | | |
| | | | ATCAGGAAGCGCTCGACGAGGCCACGGCCCTCGGGTAC | | |
| | | | GCCGAGGCCGACCCGACCGCCGACGTCGAGGGCTTCGA | | |
| | | | CGCCGCAGCCAAGGCCGCCATCCTCGCCGGGATCGCCT | | |
| | | | TCCACACGCGCGTACGCCTCGACGACGTCTACCGCGAG | | |
| | | | GGCATGACCGAGGTCACCGCCGCCGACTTCGCCTCCGC | | |
| | | | CAAGGAGATGGGCTGCACCATCAAGCTGCTCGCCATCT | | |
| | | | GCGAGCGGGCGGCGGACGGAGGGTCGGTCACCGCACGC | | |
| | | | GTGCATCCCGCGATGATCCCGCTCAGCCATCCGCTGGC | | |
| | | | CAACGTGCGCGAGGCGTACAACGCCGTGTTCGTGGAGT | | |
| | | | CCGACGCCGCCGGTCAGCTCATGTTCTACGGGCCCGGC | | |
| | | | GCCGGCGGTTCGCCGACCGCGTCCGCCGTGCTCGGCGA | | |
| | | | CCTGGTGGCCGTGTGCCGCAACCGGCTGGGCGGAGCGA | | |
| | | | CCGGACCCGGTGAGTCCGCGTACGCCGCCCTGCCCGTC | | |
| | | | TCCCCGATGGGCGACGTCGTCACGCGCTACCACATCAG | | |
| | | | CCTCGACGTGGCCGACAAACCGGGCGTGCTCGCCCAGG | | |
| | | | TCGCGACCGTGTTCGCGGAGCACGGTGTCTCCATCGAC | | |
| | | | ACCGTGCGGCAGTCCGGCAAGGACGGCGAGGCATCCCT | | |
| | | | CGTCGTCGTCACCCATCGCGCGTCCGACGCCGCCCTCG | | |
| | | | GCGGTACGGTCGAGGCGCTGCGCAAGCTCGACACCGTG | | |
| | | | CGGGGTGTCGCCAGCATCATGCGGGTTGAAGGAGAG | | |
| hom | Mycobacterium | AF126720 | ATGAGTAAGAAGCCCATCGGGGTAGCGGTACTGGGCCT | 48 | |
| | smegmatis | | GGGGAACGTCGGCAGCGAGGTCGTGCGCATCATCGCCG | | |
| | | | ACAGCGCGGACGATCTCGCGGCGCGCATCGGTGCGCCG | | |
| | | | CTGGAACTGCGCGGCGTCGGCGTGCGCCGTGTGGCCGA | | |
| | | | CGACCGCGGCGTGCCCACGGAACTGCTCACCGACGACA | | |
| | | | TCGACGCGCTGGTGTCGCGTGACGACGTCGACATCGTC | | |
| | | | GTCGAGGTCATGGGCCCCGTCGAACCGGCACGCAAGGC | | |
| | | | CATCCTGTCGGCGCTGGAGCAGGGCAAGTCGGTGGTCA | | |
| | | | CCGCCAACAAGGCGCTGATGGCCATGTCCACCGGCGAG | | |
| | | | CTCGCCCAGGCCGCCGAGAAGGCCCACGTGGACCTGTA | | |
| | | | TTTCGAGGCCGCAGTGGCCGGCGCCATCCCGGTGATCC | | |
| | | | GCCCGCTGACCCAGTCGCTGGCCGGTGACACGGTGCGC | | |
| | | | CGCGTGGCCGGCATCGTCAACGGCACCACCAACTACAT | | |
| | | | CCTGTCCGAGATGGACAGCACCGGCGCCGATTACACCA | | |
| | | | GCGCGCTGGCCGATGCGAGCGCCCTCGGTTACGCCGAG | | |
| | | | GCCGATCCCACCGCCGACGTCGAGGGCTACGACGCCGC | | |
| | | | GGCCAAGGCCGCGATCCTCGCTTCGATCGCGTTCCACA | | |
| | | | CCCGTGTGACCGCCGACGACGTGTACCGCGAGGGCATC | | |
| | | | ACCACGGTCAGCGCCGAGGACTTCGCGTCGGCACGCGC | | |
| | | | GCTGGGCTGCACCATCAAACTGCTCGCGATCTGCGAGC | | |
| | | | GGCTCACCTCCGACGAGGGCAAGGACCGGGTCTCGGCC | | |
| | | | CGCGTCTACCCGGCGCTCGTCCCGCTGACCCACCCGCT | | |
| | | | GGCCGCGGTCAACGGTGCGTTCAACGCGGTGGTGGTGG | | |
| | | | AAGCCGAGGCGGCCGGGCGGCTCATGTTCTACGGTCAA | | |
| | | | GGCGCCGGCGGTGCCCCCACCGCCTTTGCGGTGATGGG | | |
| | | | AGACGTGGTCATGGCGGCTCGCAACCGTGTCCAGGGCG | | |
| | | | GCCGTGGCCCGCGCGAATCGAAGTACGCCAAGCTGCCG | | |
| | | | ATCGCGCCCATCGGGTTCATCCCGACGCGCTACTACGT | | |
| | | | CAACATGAACGTGGCCGACCGGCCCGGCGTGTTGTCCG | | |
| | | | CTGTGGCAGCCGAATTC | | |
| hom | Thermobifida | NZ_AAAQ010 | ATGCGCCGCCCAGAACCTGCCGGTGCCGCGGATCGCGG | 49 | |
| | fusca | 00037.1 | TCGAACCCGGCCGCGCCATCGCCGGACCGGCGGGCATC | | |
| | | | ACCCTCTACGAGGTCGGCACGGTCAAGGACGTGGAGGG | | |
| | | | GATCCGCACCTATGTCAGTGTCGACGGCGGTATGAGCG | | |
| | | | ACAACATCCGCACCGCGCTGTACGGTGCGGAGTACACC | | |
| | | | TGTGTGCTGGCCTCGCGGCACAGCGACGCCGAGCCGAT | | |
| | | | GCTGTCCCGCCTGGTCGGCAAGCACTGCGAGAGCGGCG | | |
| | | | ACATCGTCGTGCGCGACCTCTACCTCCCTGCCGACCTG | | |
| | | | CGTCCCGGCGACCTGGTAGCAGTGGCCGCCACCGGCGC | | |
| | | | CTACTGCTACTCCATGGCCAGCAACTACAACCACGTGC | | |
| | | | CCCGGCCTGCCGTGGTCGCGGTCCGCGAGAAGAACGCC | | |
| | | | CGCGTCCTGGTGCGACGGGAAACCGAAGAAGACCTGTT | | |
| | | | GCGGCTGGACGTAGGCTGAGCAGTGGCCGACGACGCTC | | |
| | | | TGGCCACCACGACGAGGTTCTGGATACGGACAATGAAC | | |
| | | | GACGAAACGGGAGTCACCCCCTCATGGCACTGAAGGTG | | |
| | | | GCGCTGCTGGGTTGCGGCGTTGTGGGTTCTCAGGTGGT | | |
| | | | CCGGCTGCTCAACGAGCAGTCGCGTGAACTTGCGGAGC | | |
| | | | GCATCGGAACGCCCCTGGAGATCGGAGGCATCGCGGTG | | |
| | | | CGCCGCCTGGACCGCGCCCGGGGGACGGGCGTGGACCC | | |
| | | | CGACCTCCTCACCACCGACGCCATGGGTCTTGTGACCA | | |
| | | | GAGACGACATCGACCTCGTGGTGGAGGTCATCGGCGGC | | |
| | | | ATCGAGCCCGCCCGGTCGCTCATCCTGGCCGCGATCCA | | |
| | | | GAAGGGCAAGTCTGTGGTGACCGCCAACAAGGCGCTGC | | |
| | | | TCGCCGAGGACGGCGCGACCATCCACGCCGCTGCCCGG | | |
| | | | GAAGCGGGAGTTGACGTGTACTACGAGGCCAGCGTCGC | | |
| | | | CGGGGCCATCCCGCTGCTGCGGCCGCTGCGTGACTCCC | | |
| | | | TGGCCGGGGACCGCGTCAACCGGGTCTTGGGCATCGTC | | |
| | | | AACGGCACCACCAACTACATCCTGGACCGGATGGACAG | | |
| | | | CCTGGGCGCCGGCTTCACCGAGTCACTGGAGGAAGCCC | | |
| | | | AGGCCCTGGGATACGCCGAAGCCGACCCGACCGCCGAC | | |
| | | | GTGGAGGGCTTCGACGCCGCCGCTAAAGCCGCGATCCT | | |
| | | | GGCCCGGCTCGCCTTCCACACACCGGTGACCGCTGCCG | | |
| | | | ATGTGCACCGCGAAGGCATCACCGAGGTCTCCGCGGCC | | |
| | | | GACATCGCCAGCGCCAAGGCCATGGGCTGCGTGGTGAA | | |
| | | | ACTCCTCGCGATCTGCCAGCGCTCCGACGACGGCTCCA | | |
| | | | GCATCGGCGTGCGCGTCCACCCGGTGATGCTGCCCCGC | | |
| | | | GAACACCCGCTCGCCAGCGTCAAAGGCGCCTACAACGC | | |
| | | | GGTGTTCGTGGAAGCCGAGTCCGCCGGGCAGCTCATGT | | |
| | | | TCTACGGCGCGGGCGCGGGAGGCGTCCCCACCGCCAGC | | |
| | | | GCAGTCCTCGGCGACCTGGTCGCGGTGGCACGGAACCG | | |
| | | | CCTGGCCCGCACTTTCGTGGCCGACGGCCGGGCCGACG | | |
| | | | CGAAACTGCCCGTCCACCCCATGGGGGAGACCATCACC | | |
| | | | AGCTACCACGTGGCGCTGGACGTTGCCGACCGGCCCGG | | |
| | | | CGTGCTCGCCGGGGTCGCCAAAGTCTTCGCGGCCAACG | | |
| | | | GCGTGTCGATCAAGCACGTCCGCCAGGAAGGCCGCGGG | | |
| | | | GACGACGCCCAGCTCGTCCTGGTCAGCCACACCGCGCC | | |
| | | | GGATGCCGCCCTGGCCCGGACCGTGGAGCAACTGCGCA | | |
| | | | ACCACGAGGACGTCCGCGCGGTCGCCAGCGTGATGCGG | | |
| | | | GTCGAAACCTTCGACAACGAACGA | | |
| hom | Coryne- | Y00546 | ATGACCTCAGCATCTGCCCCAAGCTTTAACCCCGGCAA | 247 | |
| | bacterium | | GGGTCCCGGCTCAGCAGTCGGAATTGCCCTTTTAGGAT | | |
| | glutamicum | | TCGGAACAGTCGGCACTGAGGTGATGCGTCTGATGACC | | |
| | | | GAGTACGGTGATGAACTTGCGCACCGCATTGGTGGCCC | | |
| | | | ACTGGAGGTTCGTGGCATTGCTGTTTCTGATATCTCAA | | |
| | | | AGCCACGTGAAGGCGTTGCACCTGAGCTGCTCACTGAG | | |
| | | | GACGCTTTTGCACTCATCGAGCGCGAGGATGTTGACAT | | |
| | | | CGTCGTTGAGGTTATCGGCGGCATTGAGTACCCACGTG | | |
| | | | AGGTAGTTCTCGCAGCTCTGAAGGCCGGCAAGTCTGTT | | |
| | | | GTTACCGCCAATAAGGCTCTTGTTGCAGCTCACTCTGC | | |
| | | | TGAGCTTGCTGATGCAGCGGAAGCCGCAAACGTTGACC | | |
| | | | TGTACTTCGAGGCTGCTGTTGCAGGCGCAATTCCAGTG | | |
| | | | GTTGGCCCACTGCGTCGCTCCCTGGCTGGCGATCAGAT | | |
| | | | CCAGTCTGTGATGGGCATCGTTAACGGCACCACCAACT | | |
| | | | TCATCTTGGACGCCATGGATTCCACCGGCGCTGACTAT | | |
| | | | GCAGATTCTTTGGCTGAGGCAACTCGTTTGGGTTACGC | | |
| | | | CGAAGCTGATCCAACTGCAGACGTCGAAGGCCATGACG | | |
| | | | CCGCATCCAAGGCTGCAATTTTGGCATCCATCGCTTTC | | |
| | | | CACACCCGTGTTACCGCGGATGATGTGTACTGCGAAGG | | |
| | | | TATCAGCAACATCAGCGCTGCCGACATTGAGGCAGCAC | | |
| | | | AGCAGGCAGGCCACACCATCAAGTTGTTGGCCATCTGT | | |
| | | | GAGAAGTTCACCAACAAGGAAGGAAAGTCGGCTATTTC | | |
| | | | TGCTCGCGTGCACCCGACTCTATTACCTGTGTCCCACC | | |
| | | | CACTGGCGTCGGTAAACAAGTCCTTTAATGCAATCTTT | | |
| | | | GTTGAAGCAGAAGCAGCTGGTCGCCTGATGTTCTACGG | | |
| | | | AAACGGTGCAGGTGGCGCGCCAACCGCGTCTGCTGTGC | | |
| | | | TTGGCGACGTCGTTGGTGCCGCACGAAACAAGGTGCAC | | |
| | | | GGTGGCCGTGCTCCAGGTGAGTCCACCTACGCTAACCT | | |
| | | | GCCGATCGCTGATTTCGGTGAGACCACCACTCGTTACC | | |
| | | | ACCTCGACATGGATGTGGAAGATCGCGTGGGGGTTTTG | | |
| | | | GCTGAATTGGCTAGCCTGTTCTCTGAGCAAGGAATCTC | | |
| | | | CCTGCGTACAATCCGACAGGAAGAGCGCGATGATGATG | | |
| | | | CACGTCTGATCGTGGTCACCCACTCTGCGCTGGAATCT | | |
| | | | GATCTTTCCCGCACCGTTGAACTGCTGAAGGCTAAGCC | | |
| | | | TGTTGTTAAGGCAATCAACAGTGTGATCCGCCTCGAAA | | |
| | | | GGGACTAA | | |
| metL | Escherichia | V00305 | AGTGTGATTGCGCAGGCAGGGGCGAAAGGTCGTCAGCT | 248 | |
| | coli | | GCATAAATTTGGTGGCAGTAGTCTGGCTGATGTGAAGT | | |
| | | | GTTATTTGCGTGTCGCGGGCATTATGGCGGAGTACTCT | | |
| | | | CAGCCTGACGATATGATGGTGGTTTCCGCCGCCGGTAG | | |
| | | | CACCACTAACCGGTTGATTAGCTGGTTGAAACTAAGCC | | |
| | | | AGACCGATCGTCTCTCTGCGCATCAGGTTCAACAAACG | | |
| | | | CTGCGTCGCTATCAGTGCGATCTGATTAGCGGTCTGCT | | |
| | | | ACCCGCTGAAGAAGCCGATAGCCTCATTAGCGCTTTTG | | |
| | | | TCAGCGACCTTGAGCGCCTGGCGGCGCTGCTCGACAGC | | |
| | | | GGTATTAACGACGCAGTGTATGCGGAAGTGGTGGGCCA | | |
| | | | CGGGGAAGTATGGTCGGCACGTCTGATGTCTGCGGTAC | | |
| | | | TTAATCAACAAGGGCTGCCAGCGGCCTGGCTTGATGCC | | |
| | | | CGCGAGTTTTTACGCGCTGAACGCGCCGCACAACCGCA | | |
| | | | GGTTGATGAAGGGCTTTCTTACCCGTTGCTGCAACAGC | | |
| | | | TGCTGGTGCAACATCCGGGCAAACGTCTGGTGGTGACC | | |
| | | | GGATTTATCAGCCGCAACAACGCCGGTGAAACGGTGCT | | |
| | | | GCTGGGGCGTAACGGTTCCGACTATTCCGCGACACAAA | | |
| | | | TCGGTGCGCTGGCGGGTGTTTCTCGCGTAACCATCTGG | | |
| | | | AGCGACGTCGCCGGGGTATACAGTGCCGACCCGCGTAA | | |
| | | | AGTGAAAGATGCCTGCCTGCTGCCGTTGCTGCGTCTGG | | |
| | | | ATGAGGCCAGCGAACTGGCGCGCCTGGCGGCTCCCGTT | | |
| | | | CTTCACGCCCGTACTTTACAGCCGGTTTCTGGCAGCGA | | |
| | | | AATCGACCTGCAACTGCGCTGTAGCTACACGCCGGATC | | |
| | | | AAGGTTCCACGCGCATTGAACGCGTGCTGGCCTCCGGT | | |
| | | | ACTGGTGCGCGTATTGTCACCAGCCACGATGATGTCTG | | |
| | | | TTTGATTGAGTTTCAGGTGCCCGCCAGTCAGGATTTCA | | |
| | | | AACTGGGGCATAAAGAGATCGACCAAATCCTGAAACGC | | |
| | | | GCGCAGGTACGCCCGCTGGCGGTTGGCGTACATAACGA | | |
| | | | TCGCCAGTTGCTGCAATTTTGCTACACCTCAGAAGTGG | | |
| | | | CCGACAGTGCGCTGAAAATCCTCGACGAAGCGGGATTA | | |
| | | | CCTGGCGAACTGCGCCTGCGTCAGGGGCTGGCGCTGGT | | |
| | | | GGCGATGGTCGGTGCAGGCGTCACCCGTAACCCGCTGC | | |
| | | | ATTGCCACCGCTTCTGGCAGCAACTGAAAGGCCAGCCG | | |
| | | | GTCGAATTTACCTGGCAGTCCGATGACGGCATCAGCCT | | |
| | | | GGTGGCAGTACTGCGCACCGGCCCGACCGAAAGCCTGA | | |
| | | | TTCAGGGGCTGCATCAGTCCGTCTTCCGCGCAGAAAAA | | |
| | | | CGCATCGGCCTGGTATTGTTCGGTAAGGGCAATATCGG | | |
| | | | TTCCCGTTGGCTGGAACTGTTCGCCCGTGAGCAGAGCA | | |
| | | | CGCTTTCGGCACGTACCGGCTTTGAGTTTGTGCTGGCA | | |
| | | | GGTGTGGTGGACAGCCGCCGCAGCCTGTTGAGCTATGA | | |
| | | | CGGGCTGGACGCCAGCCGCGCGTTAGCCTTCTTCAACG | | |
| | | | ATGAAGCGGTTGAGCAGGATGAAGAGTCGTTGTTCCTG | | |
| | | | TGGATGCGCGCCCATCCGTATGATGATTTAGTGGTGCT | | |
| | | | GGACGTTACCGCCAGCCAGCAGCTTGCTGATCAGTATC | | |
| | | | TTGATTTCGCCAGCCACGGTTTCCACGTTATCAGCGCC | | |
| | | | AACAAACTGGCGGGAGCCAGCGACAGCAATAAATATCG | | |
| | | | CCAGATCCACGACGCCTTCGAAAAAACCGGGCGTCACT | | |
| | | | GGCTGTACAATGCCACCGTCGGTGCGGGCTTGCCGATC | | |
| | | | AACCACACCGTGCGCGATCTGATCGACAGCGGCGATAC | | |
| | | | TATTTTGTCGATCAGCGGGATCTTCTCCGGCACGCTCT | | |
| | | | CCTGGCTGTTCCTGCAATTCGACGGTAGCGTGCCGTTT | | |
| | | | ACCGAGCTGGTGGATCAGGCGTGGCAGCAGGGCTTAAC | | |
| | | | CGAACCTGACCCGCGTGACGATCTCTCTGGCAAAGACG | | |
| | | | TGAGTCGCAAGCTGGTGATTCTGGCGCGTGAAGCAGGT | | |
| | | | TACAACATCGAACCGGATCAGGTACGTGTGGAATCGCT | | |
| | | | GGTGCCTGCTCATTGCGAAGGCGGCAGCATCGACCATT | | |
| | | | TCTTTGAAAATGGCGATGAACTGAACGAGCAGATGGTG | | |
| | | | CAACGGCTGGAAGCGGCCCGCGAAATGGGGCTGGTGCT | | |
| | | | GCGCTACGTGGCGCGTTTCGATGCCAACGGTAAAGCGC | | |
| | | | GTGTAGGCGTGGAAGCGGTGCGTGAAGATCATCCGTTG | | |
| | | | CGATCACTGCTGCCGTGCGATAACGTCTTTGCCATCGA | | |
| | | | AAGCCGCTGGTATCGCGATAACCCTCTGGTGATCCGCG | | |
| | | | GACCTGGCGCTGGGCGCGACGTCACCGCCGGGGCGATT | | |
| | | | CAGTCGGATATCAACCGGCTGGCACAGTTGTTGTAA | | |
| thrA | Escherichia | U14003 | ATGCGAGTGTTGAAGTTCGGCGGTACATCAGTGGCAAA | 249 | |
| | coli | | TGCAGAACGTTTTCTGCGTGTTGCCGATATTCTGGAAA | | |
| | | | GCAATGCCAGGCAGGGGCAGGTGGCCACCGTCCTCTCT | | |
| | | | GCCCCCGCCAAAATCACCAACCACCTGGTGGCGATGAT | | |
| | | | TGAAAAAACCATTAGCGGCCAGGATGCTTTACCCAATA | | |
| | | | TCAGCGATGCCGAACGTATTTTTGCCGAACTTTTGACG | | |
| | | | GGACTCGCCGCCGCCCAGCCGGGGTTCCCGCTGGCGCA | | |
| | | | ATTGAAAACTTTCGTCGATCAGGAATTTGCCCAAATAA | | |
| | | | AACATGTCCTGCATGGCATTAGTTTGTTGGGGCAGTGC | | |
| | | | CCGGATAGCATCAACGCTGCGCTGATTTGCCGTGGCGA | | |
| | | | GAAAATGTCGATCGCCATTATGGCCGGCGTATTAGAAG | | |
| | | | CGCGCGGTCACAACGTTACTGTTATCGATCCGGTCGAA | | |
| | | | AAACTGCTGGCAGTGGGGCATTACCTCGAATCTACCGT | | |
| | | | CGATATTGCTGAGTCCACCCGCCGTATTGCGGCAAGCC | | |
| | | | GCATTCCGGCTGATCACATGGTGCTGATGGCAGGTTTC | | |
| | | | ACCGCCGGTAATGAAAAAGGCGAACTGGTGGTGCTTGG | | |
| | | | ACGCAACGGTTCCGACTACTCTGCTGCGGTGCTGGCTG | | |
| | | | CCTGTTTACGCGCCGATTGTTGCGAGATTTGGACGGAC | | |
| | | | GTTGACGGGGTCTATACCTGCGACCCGCGTCAGGTGCC | | |
| | | | CGATGCGAGGTTGTTGAAGTCGATGTCCTACCAGGAAG | | |
| | | | CGATGGAGCTTTCCTACTTCGGCGCTAAAGTTCTTCAC | | |
| | | | CCCCGCACCATTACCCCCATCGCCCAGTTCCAGATCCC | | |
| | | | TTGCCTGATTAAAAATACCGGAAATCCTCAAGCACCAG | | |
| | | | GTACGCTCATTGGTGCCAGCCGTGATGAAGACGAATTA | | |
| | | | CCGGTCAAGGGCATTTCCAATCTGAATAACATGGCAAT | | |
| | | | GTTCAGCGTTTCTGGTCCGGGGATGAAAGGGATGGTCG | | |
| | | | GCATGGCGGCGCGCGTCTTTGCAGCGATGTCACGCGCC | | |
| | | | CGTATTTCCGTGGTGCTGATTACGCAATCATCTTCCGA | | |
| | | | ATACAGCATCAGTTTCTGCGTTCCACAAAGCGACTGTG | | |
| | | | TGCGAGCTGAACGGGCAATGCAGGAAGAGTTCTACCTG | | |
| | | | GAACTGAAAGAAGGCTTACTGGAGCCGCTGGCAGTGAC | | |
| | | | GGAACGGCTGGCCATTATCTCGGTGGTAGGTGATGGTA | | |
| | | | TGCGCACCTTGCGTGGGATCTCGGCGAAATTCTTTGCC | | |
| | | | GCACTGGCCCGCGCCAATATCAACATTGTCGCCATTGC | | |
| | | | TCAGGGATCTTCTGAACGCTCAATCTCTGTCGTGGTAA | | |
| | | | ATAACGATGATGCGACCACTGGCGTGCGCGTTACTCAT | | |
| | | | CAGATGCTGTTCAATACCGATCAGGTTATCGAAGTGTT | | |
| | | | TGTGATTGGCGTCGGTGGCGTTGGCGGTGCGCTGCTGG | | |
| | | | AGCAACTGAAGCGTCAGCAAAGCTGGCTGAAGAATAAA | | |
| | | | CATATCGACTTACGTGTCTGCGGTGTTGCCAACTCGAA | | |
| | | | GGCTCTGCTCACCAATGTACATGGCCTTAATCTGGAAA | | |
| | | | ACTGGCAGGAAGAACTGGCGCAAGCCAAAGAGCCGTTT | | |
| | | | AATCTCGGGCGCTTAATTCGCCTCGTGAAAGAATATCA | | |
| | | | TCTGCTGAACCCGGTCATTGTTGACTGCACTTCCAGCC | | |
| | | | AGGCAGTGGCGGATCAATATGCCGACTTCCTGCGCGAA | | |
| | | | GGTTTCCACGTTGTCACGCCGAACAAAAAGGCCAACAC | | |
| | | | CTCGTCGATGGATTACTACCATCAGTTGCGTTATGCGG | | |
| | | | CGGAAAAATCGCGGCGTAAATTCCTCTATGACACCAAC | | |
| | | | GTTGGGGCTGGATTACCGGTTATTGAGAACCTGCAAAA | | |
| | | | TCTGCTCAATGCAGGTGATGAATTGATGAAGTTCTCCG | | |
| | | | GCATTCTTTCTGGTTCGCTTTCTTATATCTTCGGCAAG | | |
| | | | TTAGACGAAGGCATGAGTTTCTCCGAGGCGACCACGCT | | |
| | | | GGCGCGGGAAATGGGTTATACCGAACCGGACCCGCGAG | | |
| | | | ATGATCTTTCTGGTATGGATGTGGCGCGTAAACTATTG | | |
| | | | ATTCTCGCTCGTGAAACGGGACGTGAACTGGAGCTGGC | | |
| | | | GGATATTGAAATTGAACCTGTGCTGCCCGCAGAGTTTA | | |
| | | | ACGCCGAGGGTGATGTTGCCGCTTTTATGGCGAATCTG | | |
| | | | TCACAACTCGACGATCTCTTTGCCGCGCGCGTGGCGAA | | |
| | | | GGCCCGTGATGAAGGAAAAGTTTTGCGCTATGTTGGCA | | |
| | | | ATATTGATGAAGATGGCGTCTGCCGCGTGAAGATTGCC | | |
| | | | GAAGTGGATGGTAATGATCCGCTGTTCAAAGTGAAAAA | | |
| | | | TGGCGAAAACGCCCTGGCCTTCTATAGCCACTATTATC | | |
| | | | AGCCGCTGCCGTTGGTACTGCGCGGATATGGTGCGGGC | | |
| | | | AATGACGTTACAGCTGCCGGTGTCTTTGCTGATCTGCT | | |
| | | | ACGTACCCTCTCATGGAAGTTAGGAGTCTGA | | |
| metA | Mycobacterium | AL021841.1 | ATGACGATCTCCGATGTACCCACCCAGACGCTGCCCGC | 50 | |
| | tuberculosis | | CGAAGGCGAAATCGGCCTGATAGACGTCGGCTCGCTGC | | |
| | (can be used to | | AACTGGAAAGCGGGGCGGTGATCGACGATGTCTGTATC | | |
| | clone M. | | GCCGTGCAACGCTGGGGCAAATTGTCGCCCGCACGGGA | | |
| | smegmatis | | CAACGTGGTGGTGGTCTTGCACGCGCTCACCGGCGACT | | |
| | gene) | | CGCACATCACTGGACCCGCCGGACCCGGCCACCCCACC | | |
| | | | CCCGGCTGGTGGGACGGGGTGGCCGGGCCGGGTGCGCC | | |
| | | | GATTGACACCACCCGCTGGTGCGCGGTAGCTACCAATG | | |
| | | | TGCTCGGCGGCTGCCGCGGCTCCACCGGGCCCAGCTCG | | |
| | | | CTTGCCCGCGACGGAAAGCCTTGGGGCTCAAGATTTCC | | |
| | | | GCTGATCTCGATACGTGACCAGGTGCAGGCGGACGTCG | | |
| | | | CGGCGCTGGCCGCGCTGGGCATCACCGAGGTCGCCGCC | | |
| | | | GTCGTCGGCGGCTCCATGGGCGGCGCCCGGGCCCTGGA | | |
| | | | ATGGGTGGTCGGCTACCCGGATCGGGTCCGAGCCGGAT | | |
| | | | TGCTGCTGGCGGTCGGTGCGCGTGCCACCGCAGACCAG | | |
| | | | ATCGGCACGCAGACAACGCAAATCGCGGCCATCAAAGC | | |
| | | | CGACCCGGACTGGCAGAGCGGCGACTACCACGAGACGG | | |
| | | | GGAGGGCACCAGACGCCGGGCTGCGACTCGCCCGCCGC | | |
| | | | TTCGCGCACCTCACCTACCGCGGCGAGATCGAGCTCGA | | |
| | | | CACCCGGTTCGCCAACCACAACCAGGGCAACGAGGATC | | |
| | | | CGACGGCCGGCGGGCGCTACGCGGTGCAAAGTTATCTG | | |
| | | | GAACACCAAGGAGACAAACTGTTATCCCGGTTCGACGC | | |
| | | | CGGCAGCTACGTGATTCTCACCGAGGCGCTCAACAGCC | | |
| | | | ACGACGTCGGCCGCGGCCGCGGCGGGGTCTCCGCGGCT | | |
| | | | CTGCGCGCCTGCCCGGTGCCGGTGGTGGTGGGCGGCAT | | |
| | | | CACCTCCGACCGGCTCTACCCGCTGCGCCTGCAGCAGG | | |
| | | | AGCTGGCCGACCTGCTGCCGGGCTGCGCCGGGCTGCGA | | |
| | | | GTCGTCGAGTCGGTCTACGGACACGACGGCTTCCTGGT | | |
| | | | GGAAACCGAGGCCGTGGGCGAATTGATCCGCCAGACAC | | |
| | | | TGGGATTGGCTGATCGTGAAGGCGCGTGTCGGCGG | | |
| metA | Mycobacterium | Z98271.1 | ATGACAATCTCCAAGGTCCCTACCCAGAAGCTGCCGGC | 51 | |
| | leprae (can be | | CGAAGGCGAGGTCGGCTTGGTCGACATCGGCTCACTTA | | |
| | used to clone | | CCACCGAAAGCGGTGCCGTCATCGACGATGTCTGCATC | | |
| | M. smegmatis | | GCCGTTCAGCGCTGGGGGGAATTGTCGCCCACGCGAGA | | |
| | gene) | | CAACGTAGTGATGGTACTGCATGCACTCACCGGTGACT | | |
| | | | CGCACATCACCGGGCCCGCCGGACCGGGACATCCCACA | | |
| | | | CCCGGCTGGTGGGACTGGATAGCTGGACCGGGTGCACC | | |
| | | | AATCGACACCAACCGCTGGTGCGCGATAGCCACCAACG | | |
| | | | TGCTGGGCGGTTGCCGTGGCTCCACCGGCCCTAGTTCG | | |
| | | | CTTGCCCGCGACGGAAAGCCTTGGGGTTCAAGATTTCC | | |
| | | | GCTGATATCTATACGCGACCAGGTAGAGGCAGATATCG | | |
| | | | CTGCACTGGCCGCCATGGGAATTACAAAGGTTGCCGCC | | |
| | | | GTCGTTGGAGGATCTATGGGCGGGGCGCGTGCACTGGA | | |
| | | | ATGGATCATCGGCCACCCGGACCAAGTCCGGGCCGGGC | | |
| | | | TGTTGCTGGCGGTCGGTGTGCGCGCCACCGCCGACCAG | | |
| | | | ATCGGCACCCAAACCACCCAAATCGCAGCCATCAAGAC | | |
| | | | AGACCCGAACTGGCAAGGCGGTGACTACTACGAGACAG | | |
| | | | GGAGGGCACCAGAGAACGGCTTGACAATTGCCCGCCGC | | |
| | | | TTCGCCCACCTGACCTACCGCAGCGAGGTCGAGCTCGA | | |
| | | | CACCCGGTTTGCCAACAACAACCAAGGCAATGAGGACC | | |
| | | | CGGCGACGGGCGGGCGTTACGCAGTGCAGAGTTACCTA | | |
| | | | GAGCACCAGGGTGACAAGCTATTGGCCCGCTTTGACGC | | |
| | | | AGGCAGCTACGTGGTCTTGACCGAAACGCTGAACAGCC | | |
| | | | ACGACGTTGGCCGGGGCCGCGGAGGGATCGGTACAGCG | | |
| | | | CTGCGCGGGTGCCCGGTACCGGTGGTGGTGGGTGGCAT | | |
| | | | TACCTCGGATCGGCTCTACCCACTGCGCTTGCAGCAGG | | |
| | | | AGCTGGCCGAGATGCTGCCGGGCTGCACCGGGCTGCAG | | |
| | | | GTTGTAGACTCCACCTACGGGCACGACGGCTTCCTGGT | | |
| | | | GGAATCCGAGGCCGTCGGCAAATTGATCCGTCAAACCC | | |
| | | | TCGAATTGGCCGACGTGGGTTCCAAGGAAGACGCGTGT | | |
| | | | TCGCAATGA | | |
| metA | Thermobifida | NZ_AAAQ010 | GTGAGTCACGACACCACCCCTCCCCTTCCCGCGACCGG | 52 | |
| | fusca | 00035.1 | CGCGTGGCGGGAAGGGGACCCTCCGGGCGACCGGCGCT | | |
| | | | GGGTCGAACTGTCCGAACCTCTGCCGCTGGAGACCGGG | | |
| | | | GGTGAACTTCCCGGGGTCCGCCTGGCCTACGAGACGTG | | |
| | | | GGGCAGTCTCAACGAGGACCGCTCCAACGCGGTCCTCG | | |
| | | | TGCTGCACGCCCTCACCGGCGACAGCCACGTCGTAGGC | | |
| | | | CCGGAAGGCCCCGGGCACCCCAGCCCAGGCTGGTGGGA | | |
| | | | AGGCATCATCGGCCCCGGGCTGGCACTCGACACCGACC | | |
| | | | GGTACTTCGTGGTCGCCCCCAACGTGCTGGGCGGCTGC | | |
| | | | CAAGGCAGCACCGGGCCGTCGTCGACCGCGCCCGACGG | | |
| | | | CAGGCCGTGGGGGTCCCGGTTCCCGAGGATCACCATCC | | |
| | | | GCGACACGGTGCGCGCCGAGTTCGCCCTGCTGCGCGAA | | |
| | | | TTCGGCATCCACTCGTGGGCCGCGGTCCTCGGCGGGTC | | |
| | | | CATGGGCGGGATGCGTGCCCTCGAATGGGCGGCCACCT | | |
| | | | ACCCGGAGCGGGTGCGTCGCCTCCTGCTGCTGGCCAGC | | |
| | | | CCTGCGGCCAGCTCCGCACAGCAGATCGCCTGGGCCGC | | |
| | | | CCCCCAGTTGCACGCCATCCGGTCTGATCCGTACTGGC | | |
| | | | ACGGTGGCGACTACTACGACCGTCCCGGTCCGGGACCG | | |
| | | | GTCACCGGCATGGGGATCGCCCGCCGTATCGCGCACAT | | |
| | | | CACCTACCGGGGTGCCACCGAGTTCGACGAACGGTTCG | | |
| | | | GCCGCAACCCCCAAGACGGGGAAGACCCGATGGCCGGG | | |
| | | | GGCCGGTTCGCTGTCGAGTCGTACCTGGACCACCACGC | | |
| | | | GGTCAAACTCGCCCGCCGGTTCGACGCGGGCAGCTACG | | |
| | | | TCGTGCTCACCCAAGCCATGAACACCCACGACGTGGGT | | |
| | | | CGGGGCCGCGGCGGGGTGGCGCAGGCGCTGCGCCGGGT | | |
| | | | CACCGCCCGCACCATGGTGGCCGGGGTGAGCAGCGACT | | |
| | | | TCCTGTACCCCCTCGCCCAGCAGCAGGAGCTCGCCGAC | | |
| | | | GGTATTCCCGGGGCCGACGAAGTCCGCGTCATCGAATC | | |
| | | | AGCCTCGGGCCACGACGGGTTCCTCACCGAGATC~CC | | |
| | | | AAGTGTCGGTCCTCATCAAAGAACTGCTGGCGCAG | | |
| metA | Coryne- | AF052652 | ATGCCCACCCTCGCGCCTTCAGGTCAACTTGAAATCCA | 250 | |
| | bacterium | | AGCGATCGGTGATGTCTCCACCGAAGCCGGAGCAATCA | | |
| | glutamicum | | TTACAAACGCTGAAATCGCCTATCACCGCTGGGGTGAA | | |
| | | | TACCGCGTAGATAAAGAAGGACGCAGCAATGTCGTTCT | | |
| | | | CATCGAACACGCCCTCACTGGAGATTCCAACGCAGCCG | | |
| | | | ATTGGTGGGCTGACTTGCTCGGTCCCGGCAAAGCCATC | | |
| | | | AACACTGATATTTACTGCGTGATCTGTACCAACGTCAT | | |
| | | | CGGTGGTTGCAACGGTTCCACCGGACCTGGCTCCATGC | | |
| | | | ATCCAGATGGAAATTTCTGGGGTAATCGCTTCCCCGCC | | |
| | | | ACGTCCATTCGTGATCAGGTAAACGCCGAAAAACAATT | | |
| | | | CCTCGACGCACTCGGCATCACCACGGTCGCCGCAGTAG | | |
| | | | TACTACTTGGTGGTTCCATGGGTGGTGCCCGCACCCTA | | |
| | | | GAGTGGGCCGCAATGTACCCAGAAACTGTTGGCGCAGC | | |
| | | | TGCTGTTCTTGCAGTTTCTGCACGCGCCAGCGCCTGGC | | |
| | | | AAATCGGCATTCAATCCGCCCAAATTAAGGCGATTGAA | | |
| | | | AACGACCACCACTGGCACGAAGGCAACTACTACGAATC | | |
| | | | CGGCTGCAACCCAGCCACCGGACTCGGCGCCGCCCGAC | | |
| | | | GCATCGCCCACCTCACCTACCGTGGCGAACTAGAAATC | | |
| | | | GACGAACGCTTCGGCACCAAAGCCCAAAAGAACGAAAA | | |
| | | | CCCACTCGGTCCCTACCGCAAGCCCGACCAGCGCTTCG | | |
| | | | CCGTGGAATCCTACTTGGACTACCAAGCAGACAAGCTA | | |
| | | | GTACAGCGTTTCGACGCCGGCTCCTACGTCTTGCTCAC | | |
| | | | CGACGCCCTCAACCGCCACGACATTGGTCGCGACCGCG | | |
| | | | GAGGCCTCAACAAGGCACTCGAATCCATCAAAGTTCCA | | |
| | | | GTCCTTGTCGCAGGCGTAGATACCGATATTTTGTACCC | | |
| | | | CTACCACCAGCAAGAACACCTCTCCAGAAACCTGGGAA | | |
| | | | ATCTACTGGCAATGGCAAAAATCGTATCCCCTGTCGGC | | |
| | | | CACGATGCTTTCCTCACCGAAAGCCGCCAAATGGATCG | | |
| | | | CATCGTGAGGAACTTCTTCAGCCTCATCTCCCCAGACG | | |
| | | | AAGACAACCCTTCGACCTACATCGAGTTCTACATCTAA | | |
| metA | Escherichia | NC_000913 | ATGCCGATTCGTGTGCCGGACGAGCTACCCGCCGTCAA | 251 | |
| | coli | | TTTCTTGCGTGAAGAAAACGTCTTTGTGATGACAACTT | | |
| | | | CTCGTGCGTCTGGTCAGGAAATTCGTCCACTTAAGGTT | | |
| | | | CTGATCCTTAACCTGATGCCGAAGAAGATTGAAACTGA | | |
| | | | AAATCAGTTTCTGCGCCTGCTTTCAAACTCACCTTTGC | | |
| | | | AGGTCGATATTCAGCTGTTGCGCATCGATTCCCGTGAA | | |
| | | | TCGCGCAACACGCCCGCAGAGCATCTGAACAACTTCTA | | |
| | | | CTGTAACTTTGAAGATATTCAGGATCAGAACTTTGACG | | |
| | | | GTTTGATTGTAACTGGTGCGCCGCTGGGCCTGGTGGAG | | |
| | | | TTTAATGATGTCGCTTACTGGCCGCAGATCAAACAGGT | | |
| | | | GCTGGAGTGGTCGAAAGATCACGTCACCTCGACGCTGT | | |
| | | | TTGTCTGCTGGGCGGTACAGGCCGCGCTCAATATCCTC | | |
| | | | TACGGCATTCCTAAGCAAACTCGCACCGAAAAACTCTC | | |
| | | | TGGCGTTTACGAGCATCATATTCTCCATCCTCATGCGC | | |
| | | | TTCTGACGCGTGGCTTTGATGATTCATTCCTGGCACCG | | |
| | | | CATTCGCGCTATGCTGACTTTCCGGCAGCGTTGATTCG | | |
| | | | TGATTACACCGATCTGGAAATTCTGGCAGAGACGGAAG | | |
| | | | AAGGGGATGCATATCTGTTTGCCAGTAAAGATAAGCGC | | |
| | | | ATTGCCTTTGTGACGGGCCATCCCGAATATGATGCGCA | | |
| | | | AACGCTGGCGCAGGAATTTTTCCGCGATGTGGAAGCCG | | |
| | | | GACTAGACCCGGATGTACCGTATAACTATTTCCCGCAC | | |
| | | | AATGATCCGCAAAATACACCGCGAGCGAGCTGGCGTAG | | |
| | | | TCACGGTAATTTACTGTTTACCAACTGGCTCAACTATT | | |
| | | | ACGTCTACCAGATCACGCCATACGATCTACGGCACATG | | |
| | | | AATCCAACGCTGGAT | | |
| metA K233A | C. glutamicum | n/a | atgcccaccctcgcgccttcaggtcaacttgaaatccaagcg | 294 | |
| | | | atcggtgatgtctccaccgaagccggagcaatcattacaaac | | |
| | | | gctgaaatcgcctatcaccgctggggtgaataccgcgtagat | | |
| | | | aaagaaggacgcagcaatgtcgttctcatcgaacacgccctc | | |
| | | | actggagattccaacgcagccgattggtgggctgacttgctc | | |
| | | | ggtcccggcaaagccatcaacactgatatttactgcgtgatc | | |
| | | | tgtaccaacgtcatcggtggttgcaacggttccaccggacct | | |
| | | | ggctccatgcatccagatggaaatttctggggtaatcgcttc | | |
| | | | cccgccacgtccattcgtgatcaggtaaacgccgaaaaacaa | | |
| | | | ttcctcgacgcactcggcatcaccacggtcgccgcagtactt | | |
| | | | ggtggttccatgggtggtgcccgcaccctagagtgggccgca | | |
| | | | atgtacccagaaactgttggcgcagctgctgttcttgcagtt | | |
| | | | tctgcacgcgccagcgcctggcaaatcggcattcaatccgcc | | |
| | | | caaattaaggcgattgaaaacgaccaccactggcacgaaggc | | |
| | | | aactactacgaatccggctgcaacccagccaccggactcggc | | |
| | | | gccgcccgacgcatcgcccacctcacctaccgtggcgaacta | | |
| | | | gaaatcgacgaacgcttcggcaccgcagcccaaaagaacgaa | | |
| | | | aacccactcggtccctaccgcaagcccgaccagcgcttcgcc | | |
| | | | gtggaatcctacttggactaccaagcagacaagctagtacag | | |
| | | | cgtttcgacgccggctcctacgtcttgctcaccgacgccctc | | |
| | | | aaccgccacgacattggtcgcgaccgcggaggcctcaacaag | | |
| | | | gcactcgaatccatcaaagttccagtccttgtcgcaggcgta | | |
| | | | gataccgatattttgtacccctaccaccagcaagaacacctc | | |
| | | | tccagaaacctgggaaatctactggcaatggcaaaaatcgta | | |
| | | | tcccctgtcggccacgatgctttcctcaccgaaagccgccaa | | |
| | | | atggatcgcatcgtgaggaacttcttcagcctcatctcccca | | |
| | | | gacgaagacaacccttcgacctacatcgagttctacatctaa | | |
| metY | Thermobifida | NZ_AAAQ010 | GTGGCACTGCGTCCTGACAGGAGCATCATGACCGCTGA | 53 | |
| | fusca | 00035.1 | AGACACCACGCCTGAATCCACCGCGGCCGACAAGTGGT | | |
| | | | CGTTCGAAACCAAGCAGATCCACGCCGGAGCGGCCCCC | | |
| | | | GATCCGGCCACCAACGCACGGGCCACCCCCATCTACCA | | |
| | | | GACCACGTCGTACGTCTTCCGGGACACGCAGCACGGGG | | |
| | | | CCGACCTGTTCTCGCTCGCAGAGCCGGGCAACATCTAC | | |
| | | | ACGCGGATCATGAACCCCACCCAGGACGTGCTGGAAAA | | |
| | | | GCGGGTCGCGGCTCTGGAAGGCGGGGTCGCCGCGGTCG | | |
| | | | CGTTCGCGTCCGGGTCAGCTGCCATCACCGCTGCCGTC | | |
| | | | CTCAACCTGGCGGGTGCGGGTGACCACATCGTGTCCAG | | |
| | | | CCCGTCCCTGTACGGCGGCACCTACAACCTGTTCCGCT | | |
| | | | ACACCCTGCCCAAGCTCGGCATCGAGGTCACCTTCATC | | |
| | | | AAAGACCAGGACGACCTCGACGAGTGGCGTGCCGCGGC | | |
| | | | CCGCGACAACACCAAGCTGTTCTTCGCGGAAACCCTGC | | |
| | | | CCAACCCGGCGAACAACGTGCTCGACGTGCGCGCGGTG | | |
| | | | GCGGACGTCGCCCACGAGGTCGGTGTGCCGCTCATGGT | | |
| | | | CGACAACACCGTGCCCACCCCCTACCTGCAGCGGCCCA | | |
| | | | TCGACCACGGCGCGGACATCGTGGTGCACTCGGCCACC | | |
| | | | AAGTTCCTCGGCGGCCACGGCACCACGATCGCGGGCAT | | |
| | | | CGTGGTGGACGCCGGCACCTTCGACTTCGGCGCCCACG | | |
| | | | GCGACCGGTTCCCCGGCTTCGTCGAACCCGACCCCAGC | | |
| | | | TACCATGGCCTGAAGTACTGGGAGGCGCTGGGACCGGG | | |
| | | | TGCCTACGCTGCCAAGCTGCGGGTGCAACTGCTCCGCG | | |
| | | | ACACGGGCGCGGCCATCTCGCCGTTCAACAGCTTCCTG | | |
| | | | ATCCTCCAGGGGATCGAAACGCTGTCGCTGCGCATGGA | | |
| | | | ACGGCACGTCGCCAACGCCCAGGCGCTCGCCGAGTGGC | | |
| | | | TGGAATCCCGCGACGAGGTGGCGAAGGTCTACTACCCG | | |
| | | | GGCCTGCCTTCCAGCCCCTACTACGAGGCTGCAAAGAA | | |
| | | | GTACCTGCCCAAGGGGGCGGGTGCGATCGTCTCCTTTG | | |
| | | | AGCTGCACGGCGGTATCGAGGCCGGACGCGCCTTCGTG | | |
| | | | GACGGCACCGAACTGTTCAGCCAGCTCGTCAACATCGG | | |
| | | | TGACGTGCGCAGCCTCATCGTCCACCCGGCCAGCACCA | | |
| | | | CGCACAGCCAGCTCACCCCCGAAGAGCAGCTCGCCAGc | | |
| | | | GGGGTCACTCCCGGCCTCGTGCGGCTGTCCGTGGGCTT | | |
| | | | GGAACACGTTGACGACCTTCGCGCAGACTTGGAGGCCG | | |
| | | | GGCTGCGCGCAGCCAAGGCATACCAGTGA | | |
| metY | Mycobacterium | AL021841.1 | ATGAGCGCCGACAGCAATAGCACCGACGCCGATCCGAC | 54 | |
| | tuberculosis | | CGCGCATTGGTCGTTCGAAACCAAACAGATACACGCTG | | |
| | (can be used to | | GTCAGCACCCTGATCCGACCACCAACGCCCGGGCTCTG | | |
| | clone M. | | CCGATCTATGCGACCACGTCGTACACCTTCGACGACAC | | |
| | smegmatis | | CGCGCACGCCGCCGCCCTGTTCGGACTGGAAATTCCGG | | |
| | gene) | | GCAATATCTACACCCGGATCGGCAACCCCACCACCGAC | | |
| | | | GTCGTCGAGCAGCGCATCGCCGCGCTCGAGGGCGGTGT | | |
| | | | GGCCGCGCTGTTCCTGTCGTCGGGGCAGGCCGCGGAGA | | |
| | | | CGTTCGCCATCTTGAACCTGGCCGGCGCGGGCGATCAC | | |
| | | | ATCGTGTCCAGCCCGCGCCTGTACGGCGGCACCTACAA | | |
| | | | CCTGTTCCACTATTCGCTGGCCAAGCTCGGCATCGAGG | | |
| | | | TCAGCTTCGTCGACGATCCGGACGATCTGGACACCTGG | | |
| | | | CAGGCGGCGGTACGGCCCAACACCAAGGCGTTCTTCGC | | |
| | | | CGAGACCATCTCCAACCCGCAGATCGACCTGCTGGACA | | |
| | | | CCCCGGCGGTTTCCGAGGTCGCCCATCGCAACGGGGTG | | |
| | | | CCGTTGATCGTCGACAACACCATCGCCACGCCATACCT | | |
| | | | GATCCAACCGTTGGCCCAGGGCGCCGACATCGTCGTGC | | |
| | | | ATTCGGCCACCAAGTACCTGGGCGGGCACGGTGCCGCC | | |
| | | | ATCGCGGGTGTGATCGTCGACGGCGGCAACTTCGATTG | | |
| | | | GACCCAGGGCCGCTTCCCCGGCTTCACCACCCCCGACC | | |
| | | | CCAGCTACCACGGCGTGGTGTTCGCCGAGCTGGGTCCA | | |
| | | | CCGGCGTTTGCGCTCAAAGCTCGAGTGCAGCTGCTCCG | | |
| | | | TGACTACGGCTCGGCGGCTTCGCCGTTCAACGCGTTCT | | |
| | | | TGGTGGCGCAGGGTCTGGAAACGCTGAGCCTGCGGATC | | |
| | | | GAGCGGCACGTCGCCAACGCGCAGCGCGTCGCCGAGTT | | |
| | | | CCTGGCCGCCCGCGACGACGTGCTTTCGGTCAACTATG | | |
| | | | CGGGGCTGCCCTCCTCGCCCTGGCATGAGCGGGCCAAG | | |
| | | | AGGCTGGCGCCCAAGGGAACCGGGGCCGTGCTGTCCTT | | |
| | | | CGAGTTGGCCGGCGGCATCGAGGCCGGCAAGGCATTCG | | |
| | | | TGAACGCGTTGAAGCTGCACAGCCACGTCGCCAACATC | | |
| | | | GGTGACGTGCGCTCGCTGGTGATCCACCCGGCATCGAC | | |
| | | | CACTCATGCCCAGCTGAGCCCGGCCGAGCAGCTGGCGA | | |
| | | | CCGGGGTCAGCCCGGGCCTGGTGCGTTTGGCTGTGGGC | | |
| | | | ATCGAAGGTATCGACGATATCCTGGCCGACCTGGAGCT | | |
| | | | TGGCTTTGCCGCGGCCCGCAGATTCAGCGCCGACCCGC | | |
| | | | AGTCCGTGGCGGCGTTCTGA | | |
| metY | Coryne- | AF220150 | ATGCCAAAGTACGACAATTCCAATGCTGACCAGTGGGG | 252 | |
| | bacterium | | CTTTGAAACCCGCTCCATTCACGCAGGCCAGTCAGTAG | | |
| | glutamicum | | ACGCACAGACCAGCGCACGAAACCTTCCGATCTACCAA | | |
| | | | TCCACCGCTTTCGTGTTCGACTCCGCTGAGCACGCCAA | | |
| | | | GCAGCGTTTCGCACTTGAGGATCTAGGCCCTGTTTACT | | |
| | | | CCCGCCTCACCAACCCAACCGTTGAGGCTTTGGAAAAC | | |
| | | | CGCATCGCTTCCCTCGAAGGTGGCGTCCACGCTGTAGC | | |
| | | | GTTCTCCTCCGGACAGGCCGCAACCACCAACGCCATTT | | |
| | | | TGAACCTGGCAGGAGCGGGCGACCACATCGTCACCTCC | | |
| | | | CCACGCCTCTACGGTGGCACCGAGACTCTATTCCTTAT | | |
| | | | CACTCTTAACCGCCTGGGTATCGATGTTTCCTTCGTGG | | |
| | | | AAAACCCCGACGACCCTGAGTCCTGGCAGGCAGCCGTT | | |
| | | | CAGCCAAACACCAAAGCATTCTTCGGCGAGACTTTCGC | | |
| | | | CAACCCACAGGCAGACGTCCTGGATATTCCTGCGGTGG | | |
| | | | CTGAAGTTGCGCACCGCAACAGCGTTCCACTGATCATC | | |
| | | | GACAACACCATCGCTACCGCAGCGCTCGTGCGCCCGCT | | |
| | | | CGAGCTCGGCGCAGACGTTGTCGTCGCTTCCCTCACCA | | |
| | | | AGTTCTACACCGGCAACGGCTCCGGACTGGGCGGCGTG | | |
| | | | CTTATCGACGGCGGAAAGTTCGATTGGACTGTCGAAAA | | |
| | | | GGATGGAAAGCCAGTATTCCCCTACTTCGTCACTCCAG | | |
| | | | ATGCTGCTTACCACGGATTGAAGTACGCAGACCTTGGT | | |
| | | | GCACCAGCCTTCGGCCTCAAGGTTCGCGTTGGCCTTCT | | |
| | | | ACGCGACACCGGCTCCACCCTCTCCGCATTCAACGCAT | | |
| | | | GGGCTGCAGTCCAGGGCATCGACACCCTTTCCCTGCGC | | |
| | | | CTGGAGCGCCACAACGAAAACGCCATCAAGGTTGCAGA | | |
| | | | ATTCCTCAACAACCACGAGAAGGTGGAAAAGGTTAACT | | |
| | | | TCGCAGGCCTGAAGGATTCCCCTTGGTACGCAACCAAG | | |
| | | | GAAAAGCTTGGCCTGAAGTACACCGGCTCCGTTCTCAC | | |
| | | | CTTCGAGATCAAGGGCGGCAAGGATGAGGCTTGGGCAT | | |
| | | | TTATCGACGCCCTGAAGCTACACTCCAACCTTGCAAAC | | |
| | | | ATCGGCGATGTTCGCTCCCTCGTTGTTCACCCAGCAAC | | |
| | | | CACCACCCATTCACAGTCCGACGAAGCTGGCCTGGCAC | | |
| | | | GCGCGGGCGTTACCCAGTCCACCGTCCGCCTGTCCGTT | | |
| | | | GGCATCGAGACCATTGATGATATCATCGCTGACCTCGA | | |
| | | | AGGCGGCTTTGCTGCAATCTAG | | |
| metY D231A | C. glutamicum | N/a | ATGCCAAAGTACGACAATTCCAATGCTGACCAGTGGGGCTTT | 295 | |
| | | | GAAACCCGCTCCATTCACGCAGGCCAGTCAGTAGACGCACAG | | |
| | | | ACCAGCGCACGAAACCTTCCGATCTACCAATCCACCGCTTTC | | |
| | | | GTGTTCGACTCCGCTGAGCACGCCAAGCAGCGTTTCGCACTT | | |
| | | | GAGGATCTAGGCCCTGTTTACTCCCGCCTCACCAACCCAACC | | |
| | | | GTTGAGGCTTTGGAAAACCGCATCGCTTCCCTCGAAGGTGGC | | |
| | | | GTCCACGCTGTAGCGTTCTCCTCCGGACAGGCCGCAACCACC | | |
| | | | AACGCCATTTTGAACCTGGCAGGAGCGGGCGACCACATCGTC | | |
| | | | ACCTCCCCACGCCTCTACGGTGGCACCGAGACTCTATTCCTT | | |
| | | | ATCACTCTTAACCGCCTGGGTATCGATGTTTCCTTCGTGGAA | | |
| | | | AACCCCGACGACCCTGAGTCCTGGCAGGCAGCCGTTCAGCCA | | |
| | | | AACACCAAAGCATTCTTCGGCGAGACTTTCGCCAACCCACAG | | |
| | | | GCAGACGTCCTGGATATTCCTGCGGTGGCTGAAGTTGCGCAC | | |
| | | | CGCAACAGCGTTCCACTGATCATCGACAACACCATCGCTACC | | |
| | | | GCAGCGCTCGTGCGCCCGCTCGAGCTCGGCGCAGACGTTGTC | | |
| | | | GTCGCTTCCCTCACCAAGTTCTACACCGGCAACGGCTCCGGA | | |
| | | | CTGGGCGGCGTGCTTATCGCCGGCGGAAAGTTCGATTGGACT | | |
| | | | GTCGAAAAGGATGGAAAGCCAGTATTCCCCTACTTCGTCACT | | |
| | | | CCAGATGCTGCTTACCACGGATTGAAGTACGCAGACCTTGGT | | |
| | | | GCACCAGCCTTCGGCCTCAAGGTTCGCGTTGGCCTTCTACGC | | |
| | | | GACACCGGCTCCACCCTCTCCGCATTCAACGCATGGGCTGCA | | |
| | | | GTCCAGGGCATCGACACCCTTTCCCTGCGCCTGGAGCGCCAC | | |
| | | | AACGAAAACGCCATCAAGGTTGCAGAATTCCTCAACAACCAC | | |
| | | | GAGAAGGTGGAAAAGGTTAACTTCGCAGGCCTGAAGGATTCC | | |
| | | | CCTTGGTACGCAACCAAGGAAAAGCTTGGCCTGAAGTACACC | | |
| | | | GGCTCCGTTCTCACCTTCGAGATCAAGGGCGGCAAGGATGAG | | |
| | | | GCTTGGGCATTTATCGACGCCCTGAAGCTACACTCCAACCTT | | |
| | | | GCAAACATCGGCGATGTTCGCTCCCTCGTTGTTCACCCAGCA | | |
| | | | ACCACCACCCATTCACAGTCCGACGAAGCTGGCCTGGCACGC | | |
| | | | GCGGGCGTTACCCAGTCCACCGTCCGCCTGTCCGTTGGCATC | | |
| | | | GAGACCATTGATGATATCATCGCTGACCTCGAAGGCGGCTTT | | |
| | | | GCTGCAATCTAG | | |
| metY G232A | C. glutamicum | N/a | ATGCCAAAGTACGACAATTCCAATGCTGACCAGTGGGGCTTT | 296 | |
| | | | GAAACCCGCTCCATTCACGCAGGCCAGTCAGTAGACGCACAG | | |
| | | | ACCAGCGCACGAAACCTTCCGATCTACCAATCCACCGCTTTC | | |
| | | | GTGTTCGACTCCGCTGAGCACGCCAAGCAGCGTTTCGCACTT | | |
| | | | GAGGATCTAGGCCCTGTTTACTCCCGCCTCACCAACCCAACC | | |
| | | | GTTGAGGCTTTGGAAAACCGCATCGCTTCCCTCGAAGGTGGC | | |
| | | | GTCCACGCTGTAGCGTTCTCCTCCGGACAGGCCGCAACCACC | | |
| | | | AACGCCATTTTGAACCTGGCAGGAGCGGGCGACCACATCGTC | | |
| | | | ACCTCCCCACGCCTCTACGGTGGCACCGAGACTCTATTCCTT | | |
| | | | ATCACTCTTAACCGCCTGGGTATCGATGTTTCCTTCGTGGAA | | |
| | | | AACCCCGACGACCCTGAGTCCTGGCAGGCAGCCGTTCAGCCA | | |
| | | | AACACCAAAGCATTCTTCGGCGAGACTTTCGCCAACCCACAG | | |
| | | | GCAGACGTCCTGGATATTCCTGCGGTGGCTGAAGTTGCGCAC | | |
| | | | CGCAACAGCGTTCCACTGATCATCGACAACACCATCGCTACC | | |
| | | | GCAGCGCTCGTGCGCCCGCTCGAGCTCGGCGCAGACGTTGTC | | |
| | | | GTCGCTTCCCTCACCAAGTTCTACACCGGCAACGGCTCCGGA | | |
| | | | CTGGGCGGCGTGCTTATCGACGCCGGAAAGTTCGATTGGACT | | |
| | | | GTCGAAAAGGATGGAAAGCCAGTATTCCCCTACTTCGTCACT | | |
| | | | CCAGATGCTGCTTACCACGGATTGAAGTACGCAGACCTTGGT | | |
| | | | GCACCAGCCTTCGGCCTCAAGGTTCGCGTTGGCCTTCTACGC | | |
| | | | GACACCGGCTCCACCCTCTCCGCATTCAACGCATGGGCTGCA | | |
| | | | GTCCAGGGCATCGACACCCTTTCCCTGCGCCTGGAGCGCCAC | | |
| | | | AACGAAAACGCCATCAAGGTTGCAGAATTCCTCAACAACCAC | | |
| | | | GAGAAGGTGGAAAAGGTTAACTTCGCAGGCCTGAAGGATTCC | | |
| | | | CCTTGGTACGCAACCAAGGAAAAGCTTGGCCTGAAGTACACC | | |
| | | | GGCTCCGTTCTCACCTTCGAGATCAAGGGCGGCAAGGATGAG | | |
| | | | GCTTGGGCATTTATCGACGCCCTGAAGCTACACTCCAACCTT | | |
| | | | GCAAACATCGGCGATGTTCGCTCCCTCGTTGTTCACCCAGCA | | |
| | | | ACCACCACCCATTCACAGTCCGACGAAGCTGGCCTGGCACGC | | |
| | | | GCGGGCGTTACCCAGTCCACCGTCCGCCTGTCCGTTGGCATC | | |
| | | | GAGACCATTGATGATATCATCGCTGACCTCGAAGGCGGCTTT | | |
| | | | GCTGCAATCTAG | | |
| metK | Mycobacterium | Z80108.1 | GTGAGCGAAAAGGGTCGGCTGTTTACCAGTGAGTCGGT | 55 | |
| | tuberculosis | | GACAGAGGGACATCCCGACAAGATCTGTGACGCCATCA | | |
| | (can be used to | | GCGACTCGGTTCTGGACGCGCTTCTAGCGGCGGACCCG | | |
| | clone M. | | CGCTCACGTGTCGCGGTCGAGACGCTGGTGACCACCGG | | |
| | smegmatis | | GCAGGTGCACGTGGTGGGTGAGGTGACCACCTCGGCTA | | |
| | gene) | | AGGAGGCGTTTGCCGACATCACCAACACGGTCCGCGCA | | |
| | | | CGGATCCTCGAGATCGGCTACGACTCGTCGGACAAGGG | | |
| | | | TTTCGACGGGGCGACCTGCGGGGTGAACATCGGCATCG | | |
| | | | GCGCACAGTCACCCGACATCGCCCAGGGGGTCGACACC | | |
| | | | GCCCACGAGGCCCGGGTCGAGGGCGCGGCCGATCCGCT | | |
| | | | GGACTCCCAGGGCGCCGGTGACCAGGGCCTGATGTTCG | | |
| | | | GCTACGCGATCAATGCCACCCCGGAACTGATGCCACTG | | |
| | | | CCCATCGCGCTGGCCCACCGACTGTCGCGGCGGCTGAC | | |
| | | | CGAGGTCCGCAAGAACGGGGTGCTGCCCTACCTGCGTC | | |
| | | | CGGATGGCAAGACGCAGGTCACTATCGCCTACGAGGAC | | |
| | | | AACGTTCCGGTGCGGCTGGATACCGTGGTCATCTCCAC | | |
| | | | CCAGCACGCGGCCGATATCGACCTGGAGAAGACGCTTG | | |
| | | | ATCCCGACATCCGGGAAAAGGTGCTCAACACCGTGCTC | | |
| | | | GACGACCTGGCCCACGAAACCCTGGACGCGTCGACGGT | | |
| | | | GCGGGTGCTGGTGAACCCGACCGGCAAGTTCGTGCTCG | | |
| | | | GCGGGCCGATGGGCGATGCCGGGCTCACCGGCCGCAAG | | |
| | | | ATCATCGTCGACACCTACGGCGGCTGGGCCCGCCACGG | | |
| | | | CGGCGGCGCCTTCTCCGGCAAGGATCCGTCCAAGGTGG | | |
| | | | ACCGGTCGGCGGCGTACGCGATGCGCTGGGTGGCCAAG | | |
| | | | AATGTCGTCGCCGCCGGGTTGGCTGAACGGGTCGAGGT | | |
| | | | GCAGGTGGCCTACGCCATCGGTAAAGCGGCACCCGTCG | | |
| | | | GCCTGTTCGTCGAGACGTTCGGTACCGAGACGGAAGAC | | |
| | | | CCGGTCAAGATCGAGAAGGCCATCGGCGAGGTATTCGA | | |
| | | | CCTGCGCCCCGGTGCCATCATCCGCGACCTGAACCTGT | | |
| | | | TGCGCCCGATCTATGCGCCGACCGCCGCCTACGGGCAC | | |
| | | | TTCGGCCGCACCGACGTCGAATTACCGTGGGAGCAGCT | | |
| | | | CGACAAGGTCGACGACCTCAAGCGCGCCATCTAG | | |
| metK | Mycobacterium | AL583918.1 | GTGAGTGAGAAGGGTCGGCTGTTCACTAGCGAGTCGGT | 56 | |
| | leprae (can be | | GACTGAGGGACATCCCGACAAGATCTGTGATGCGATCA | | |
| | used to clone | | GCGACTCGATCCTTGACGCACTTTTGGCGGAGGATCCT | | |
| | M. smegmatis | | TGCTCACGTGTCGCGGTCGAGACGTTGGTCACCACCGG | | |
| | gene) | | GCAGGTGCATGTGGTGGGTGAAGTGACGACGTTGGCCA | | |
| | | | AGACGGCGTTCGCTGATATCAGTAATACGGTCCGCGAA | | |
| | | | CGTATTCTCGATATCGGCTACGACTCGTCGGACAAGGG | | |
| | | | CTTCGATGGGGCGTCGTGCGGAGTTAACATTGGCATCG | | |
| | | | GCGCTCAGTCGTCTGACATTGCTCAAGGCGTCAATACC | | |
| | | | GCCCATGAAGTACGCGTCGAGGGCGCGGCGGATCCGCT | | |
| | | | GGACGCCCAGGGTGCTGGTGACCAAGGCCTGATGTTCG | | |
| | | | GTTACGCGATCAATGACACCCCGGAACTGATGCCGCTA | | |
| | | | CCGATTGCACTGGCCCACCGACTGGCGCGAAGGCTGAC | | |
| | | | CGAGGTACGCAAGAACGGCGTGCTGCCCTACCTGCGTT | | |
| | | | CCGACGGCAAGACCCAGGTCACTATCGCCTACGAGGAC | | |
| | | | AATGTCCCAGTGCGTTTGGACACTGTGGTCATCTCcAC | | |
| | | | TCAGCACGCCGCTGGTGTCGACCTGGATGCCACGCTGG | | |
| | | | CTCCTGATATCCGGGAGAAGGTGCTCAACACCGTTATT | | |
| | | | GACGATCTGTCTCATGACACCTTGGATGTATCGTCGGT | | |
| | | | GCGGGTGCTGGTAAACCCGACCGGCAAGTTCGTGCTAG | | |
| | | | GTGGGCCGATGGGCGATGCCGGGCTCACCGGTCGCAAG | | |
| | | | ATCATCGTCGACACCTACGGTGGCTGGGCGCGTCACGG | | |
| | | | CGGCGGCGCCTTCTCTGGCAAGGATCCGTCCAAGGTGG | | |
| | | | ACCGGTCGGCAGCCTACGCGATGCGCTGGGTGGCCAAG | | |
| | | | AACATCGTCGCTGCCGGGCTGGCGGAGCGAATCGAGGT | | |
| | | | GCAGGTGGCATACGCCATCGGCAAAGCCGCCCCGGTCG | | |
| | | | GTTTGTTCGTCGAGACCTTTGGCACTGAGGCGGTCGAT | | |
| | | | CCGGCCAAAATCGAGAAAGCCATCGGCGAGGTGTTCGA | | |
| | | | TCTGCGTCCCGGCGCGATCATCCGCGACCTGCATCTGC | | |
| | | | TGCGCCCAATTTACGCGCAAACCGCTGCCTATGGGCAC | | |
| | | | TTCGGTCGCACTGACGTCGAACTGCCATGGGAGCAGCT | | |
| | | | CAACAAAGTCGACGATCTCAAGCGCGCCATC | | |
| metK | Thermobifida | NZ_AAAQ010 | GTGTCCCGTCGACTTTTCACCTCCGAGTCGGTCACCGA | 57 | |
| | fusca | 00031.1 | AGGCCACCCCGACAAGATCGCTGACCAGATCAGTGACG | | |
| | | | CGATCCTCGACTCGATGCTCAGGGATGACCCCCACAGC | | |
| | | | CGGGTCGCGGTGGAGACCCTCATCACGACCGGCCTGGT | | |
| | | | CCACGTCGCCGGCGAAGTGACCACATCCACCTACGTCG | | |
| | | | ACATTCCCACCATCATCCGCGAGAAGATCCTGGAGATC | | |
| | | | GGCTACGACTCCTCGGCCAAGGGGTTCGACGGCGCCTC | | |
| | | | CTGCGGAGTGTCCGTGTCGATCGGCGGGCAGTCACCCG | | |
| | | | ACATCGCCCAGGGCGTCGACAACGCCTACGAGGCCCGG | | |
| | | | GAGGAAGAGATCTTCGACGACCTCGACCGGCAGGGCGC | | |
| | | | AGGCGACCAAGGCCTCATGTTCGGCTACGCCAACAACG | | |
| | | | AGACCCCGGAGCTGATGCCGCTGCCGATCACGCTGGCC | | |
| | | | CACGCCCTGTCGCAGCGACTCGCTGAAGTGCGCCGCGA | | |
| | | | CGGGACCATCCCCTACCTGCGGCCCGACGGCAAGACCC | | |
| | | | AGGTCACCGTGGAGTACGACGGGAACCGGCCCGTCCGG | | |
| | | | TTGGACACCGTGGTGGTCTCCAGCCAGCACGCGCCCGA | | |
| | | | CATCGACCTGCGGGAACTGCTCACCCCGGACATCAAGG | | |
| | | | AGCACGTGGTCGACCCGGTAGTGGCCCGCTACAACCTG | | |
| | | | GAGGCCGACAACTACCGACTGCTCGTCAACCCCACCGG | | |
| | | | ACGGTTCGAGATCGGCGGCCCGATGGGTGACGCCGGGC | | |
| | | | TGACCGGCCGCAAGATCATCGTCGACACCTACGGCGGC | | |
| | | | TACGCCCGCCACGGCGGTGGCGCGTTCTCCGGCAAGGA | | |
| | | | CCCGTCCAAGGTGGACCGCTCCGCCGCGTACGCCACCC | | |
| | | | GCTGGGTCGCGAAGAACATCGTCGCCGCCGGGCTCGCC | | |
| | | | GACCGAGTCGAAGTCCAGGTCGCCTACGCGATCGGCAA | | |
| | | | AGCCCACCCGGTCGGCGTGTTCCTGGAGACCTTCGGCA | | |
| | | | CCGAGAAGGTCGCCCCGGAGCAGTTGGAGAAGGCGGTG | | |
| | | | CTGGAGGTCTTCGACCTGCGTCCCGCCGCGATCATCCG | | |
| | | | CGACCTGGACCTGCTGCGCCCCATCTACTCCCAGACCT | | |
| | | | CGGTCTACGGCCACTTCGGCCGGGAGCTGCCCGACTTC | | |
| | | | ACCTGGGAGCGCACCGACCGCGTCGACGCTCTCAAGGC | | |
| | | | TGCCGTGGGCGCCTGA | | |
| metk | Streptomyces | AL939109.1 | GTGTCCCGTCGCCTGTTCACCTCGGAGTCCGTGACCGA | 58 | |
| | coelicolor | | AGGTCACCCCGACAAGATCGCTGACCAGATCAGCGACA | | |
| | | | CGATTCTCGACGCGCTTCTGCGCGAGGACCCGACCTCC | | |
| | | | CGGGTCGCCGTCGAAACCCTGATCACCACCGGTCTGGT | | |
| | | | GCACGTGGCCGGCGAGGTCACCACCAAGGCCTACGCGG | | |
| | | | ACATCGCCAACCTGGTCCGCGGCAAGATCCTGGAGATC | | |
| | | | GGCTACGACTCCTCCAAGAAGGGCTTCGACGGCGCCTC | | |
| | | | CTGCGGCGTCTCGGTCTCCATCGGCGCGCAGTCCCCGG | | |
| | | | ACATCGCGCAGGGCGTCGACACGGCGTACGAGAACCGG | | |
| | | | GTGGAGGGCGACGAGGACGAGCTGGACCGCCAGGGTGC | | |
| | | | CGGCGACCAGGGCCTGATGTTCGGCTACGCGTCCGACG | | |
| | | | AGACGCCGACGCTGATGCCGCTGCCGGTCTTCCTGGCG | | |
| | | | CACCGCCTGTCCAAGCGCCTGTCCGAGGTCCGCAAGAA | | |
| | | | CGGCACCATCCCGTACCTGCGTCCGGACGGCAAGACCC | | |
| | | | AGGTCACCATCGAGTACGACGGCGACAAGGCCGTCCGT | | |
| | | | CTGGACACGGTCGTCGTCTCCTCCCAGCACGCGAGCGA | | |
| | | | CATCGACCTGGAGTCGCTGCTGGCGCCGGACATCAAGG | | |
| | | | AGTTCGTCGTCGAGCCGGAGCTGAAGGCGCTCCTCGAG | | |
| | | | GACGGCATCAAGATCGACACGGAGAACTACCGCCTCCT | | |
| | | | GGTCAACCCGACCGGCCGCTTCGAGATCGGCGGCCCGA | | |
| | | | TGGGCGACGCCGGTCTGACCGGCCGCAAGATCATCATC | | |
| | | | GACACCTACGGCGGCATGGCCCGGCACGGCGGCGGCGC | | |
| | | | CTTCTCCGGCAAGGACCCGTCGAAGGTCGACCGCTCCG | | |
| | | | CGGCGTACGCGATGCGCTGGGTCGCCAAGAACGTCGTG | | |
| | | | GCCGCGGGTCTCGCCGCGCGCTGCGAGGTCCAGGTCGC | | |
| | | | CTACGCCATCGGCAAGGCCGAGCCCGTGGGTCTGTTCG | | |
| | | | TGGAGACCTTCGGTACCGCCAAGGTCGACACCGAGAAG | | |
| | | | ATCGAGAAGGCGATCGACGAGGTCTTCGACCTGCGCCC | | |
| | | | GGCCGCCATCATCCGCGCTCTCGACCTGCTCCGCCCGA | | |
| | | | TCTACGCCCAGACCGCGGCGTACGGTCACTTCGGCCGT | | |
| | | | GAGCTGCCCGACTTCACGTGGGAGCGCACCGACCGCGT | | |
| | | | GGACGCGCTGCGCGAGGCCGCGGGCCTGTAA | | |
| metK | Coryne- | AP005279 | GTGGCTCAGCCAACCGCCGTCCGTTTGTTCACCAGTGA | 253 | |
| | bacterium | | ATCTGTAACTGAGGGACATCCAGACAAAATATGTGATG | | |
| | glutamicum | | CTATTTCCGATACCATTTTGGACGCGCTGCTCGAAAAA | | |
| | | | GATCCGCAGTCGCGCGTCGCAGTGGAAACTGTGGTCAC | | |
| | | | CACCGGAATCGTCCATGTTGTTGGCGAGGTCCGTACCA | | |
| | | | GCGCTTACGTAGAGATCCCTCAATTAGTCCGCAACAAG | | |
| | | | CTCATCGATATCGGATTCAACTCCTCTGAGGTTGGATT | | |
| | | | CGACGGACGCACCTGTGGCGTCTCAGTATCCATCGGTG | | |
| | | | AGCAGTCCCAGGAAATCGCTGACGGCGTGGATAACTCC | | |
| | | | GACGAAGCCCGCACCAACGGCGACGTTGAAGAAGACGA | | |
| | | | CCGCGCAGGTGCTGGCGACCAGGGCCTGATGTTCGGCT | | |
| | | | ACGCCACCAACGAAACCGAAGAGTACATGCCTCTTCCT | | |
| | | | ATCGCGTTGGCGCACCGACTGTCACGTCGTCTGACCCA | | |
| | | | GGTTCGTAAAGAGGGCATCGTTCCTCACCTGCGTCCAG | | |
| | | | ACGGAAAAACCCAGGTCACCTTCGCATACGATGCGCAA | | |
| | | | GACCGCCCTAGCCACCTGGATACCGTTGTCATCTCCAC | | |
| | | | CCAGCACGACCCAGAAGTTGACCGTGCATGGTTGGAAA | | |
| | | | CCCAACTGCGCGAACACGTCATTGATTGGGTAATCAAA | | |
| | | | GACGCAGGCATTGAGGATCTGGCAACCGGTGAGATCAC | | |
| | | | CGTGTTGATCAACCCTTCAGGTTCCTTCATTCTGGGTG | | |
| | | | GCCCCATGGGTGATGCGGGTCTGACCGGCCGCAAGATC | | |
| | | | ATCGTGGATACCTACGGTGGCATGGCTCGCCATGGTGG | | |
| | | | TGGAGCATTCTCCGGTAAGGATCCAAGCAAGGTGGACC | | |
| | | | GCTCTGCTGCATACGCCATGCGTTGGGTAGCAAAGAAC | | |
| | | | ATCGTGGCAGCAGGCCTTGCTGATCGCGCTGAAGTTCA | | |
| | | | GGTTGCATACGCCATTGGACGCGCAAAGCCAGTCGGAC | | |
| | | | TTTACGTTGAAACCTTTGACACCAACAAGGAAGGCCTG | | |
| | | | AGCGACGAGCAGATTCAGGCTGCCGTGTTGGAGGTCTT | | |
| | | | TGACCTGCGTCCAGCAGCAATTATCCGTGAGCTTGATC | | |
| | | | TGCTTCGTCCGATCTACGCTGACACTGCTGCCTACGGC | | |
| | | | CACTTTGGTCGCACTGATTTGGACCTTCCTTGGGAGGC | | |
| | | | TATCGACCGCGTTGATGAACTTCGCGCAGCCCTCAAGT | | |
| | | | TGGCC | | |
| metK | Escherichia | U28377 | ATGGCAAAACACCTTTTTACGTCCGAGTCCGTCTCTGA | 254 | |
| | coli | | AGGGCATCCTGACAAAATTGCTGACCAAATTTCTGATG | | |
| | | | CCGTTTTAGACGCGATCCTCGAACAGGATCCGAAAGCA | | |
| | | | CGCGTTGCTTGCGAAACCTACGTAAAAACCGGCATGGT | | |
| | | | TTTAGTTGGCGGCGAAATCACCACCAGCGCCTGGGTAG | | |
| | | | ACATCGAAGAGATCACCCGTAACACCGTTCGCGAAATT | | |
| | | | GGCTATGTGCATTCCGACATGGGCTTTGACGCTAACTC | | |
| | | | CTGTGCGGTTCTGAGCGCTATCGGCAAACAGTCTCCTG | | |
| | | | ACATCAACCAGGGCGTTGACCGTGCCGATCCGCTGGAA | | |
| | | | CAGGGCGCGGGTGACCAGGGTCTGATGTTTGGCTACGC | | |
| | | | AACTAATGAAACCGACGTGCTGATGCCAGCACCTATCA | | |
| | | | CCTATGCACACCGTCTGGTACAGCGTCAGGCTGAAGTG | | |
| | | | CGTAAAAACGGCACTCTGCCGTGGCTGCGCCCGGACGC | | |
| | | | GAAAAGCCAGGTGACTTTTCAGTATGACGACGGCAAAA | | |
| | | | TCGTTGGTATCGATGCTGTCGTGCTTTCCACTCAGCAC | | |
| | | | TCTGAAGAGATCGACCAGAAATCGCTGCAAGAAGCGGT | | |
| | | | AATGGAAGAGATCATCAAGCCAATTCTGCCCGCTGAAT | | |
| | | | GGCTGACTTCTGCCACCAAATTCTTCATCAACCCGACC | | |
| | | | GGTCGTTTCGTTATCGGTGGCCCAATGGGTGACTGCGG | | |
| | | | TCTGACTGGTCGTAAAATTATCGTTGATACCTACGGCG | | |
| | | | GCATGGCGCGTCACGGTGGCGGTGCATTCTCTGGTAAA | | |
| | | | GATCCATCAAAAGTGGACCGTTCCGCAGCCTACGCAGC | | |
| | | | ACGTTATGTCGCGAAAAACATCGTTGCTGCTGGCCTGG | | |
| | | | CCGATCGTTGTGAAATTCAGGTTTCCTACGCAATCGGC | | |
| | | | GTGGCTGAACCGACCTCCATCATGGTAGAAACTTTCGG | | |
| | | | TACTGAGAAAGTGCCTTCTGAACAACTGACCCTGCTGG | | |
| | | | TACGTGAGTTCTTCGACCTGCGCCCATACGGTCTGATT | | |
| | | | CAGATGCTGGATCTGCTGCACCCGATCTACAAAGAAAC | | |
| | | | CGCAGCATACGGTCACTTTGGTCGTGAACATTTCCCGT | | |
| | | | GGGAAAAAACCGACAAAGCGCAGCTGCTGCGCGATGCT | | |
| | | | GCCGGTCTGAAG | | |
| metC | Mycobacterium | AL021428.1 | ATGCAGGACAGCATCTTCAATCTGTTGACCGAGGAACA | 130 | |
| | tuberculosis | | GCTTCGGGGTCGCAACACGCTCAAGTGGAACTATTTCG | | |
| | (use this to | | GGCCCGATGTAGTGCCACTGTGGCTGGCGGAGATGGAC | | |
| | clone M. | | TTTCCCACCGCACCGGCTGTGCTCGACGGGGTGCGGGC | | |
| | smegmatis | | GTGCGTCGACAACGAGGAGTTCGGCTACCCGCCGTTGG | | |
| | gene) | | GCGAGGACAGCCTGCCGAGGGCGACGGCCGATTGGTGC | | |
| | | | CGACAACGCTACGGTTGGTGCCCCCGACCGGACTGGGT | | |
| | | | CCGCGTCGTGCCGGATGTCCTGAAGGGGATGGAAGTCG | | |
| | | | TCGTCGAATTCCTTACCCGGCCGGAGAGTCCGGTCGCG | | |
| | | | TTGCCGGTTCCGGCTTACATGCCGTTTTTCGACGTCCT | | |
| | | | GCACGTCACCGGCCGCCAACGAGTGGAAGTCCCAATGG | | |
| | | | TGCAGCAAGACTCGGGACGCTACCTGCTGGACCTGGAC | | |
| | | | GCTCTGCAGGCCGCGTTCGTCCGCGGTGCCGGATCGGT | | |
| | | | GATTATCTGCAATCCGAATAACCCACTGGGTACGGCGT | | |
| | | | TCACCGAAGCCGAGCTACGTGCGATTGTGGATATCGCG | | |
| | | | GCCCGCCACGGCGCCCGGGTGATCGCGGATGAGATCTG | | |
| | | | GGCACCGGTGGTCTACGGATCGCGCCATGTCGCCGCCG | | |
| | | | CTTCGGTGTCGGAGGCGGCGGCTGAAGTCGTGGTCACG | | |
| | | | TTGGTGTCGGCGTCCAAAGGCTGGAACTTGCCGGGTCT | | |
| | | | GATGTGCGCTCAGGTGATCCTGTCTAACCGCCGTGACG | | |
| | | | CCCACGACTGGGACCGGATCAACATGTTGCACCGCATG | | |
| | | | GGCGCATCAACGGTCGGTATCCGCGCGAACATCGCCGC | | |
| | | | CTACCATCATGGCGAATCTTGGTTGGACGAGCTGCTCC | | |
| | | | CTTATCTGCGGGCGAACCGTGATCATCTGGCACGGGCG | | |
| | | | CTGCCGGAGTTAGCTCCCGGGGTAGAGGTCAACGCTCC | | |
| | | | GGACGGTACCTACCTGTCGTGGGTGGATTTCCGTGCGC | | |
| | | | TGGCTCTGCCGTCTGAACCGGCGGAATACCTGCTCTCG | | |
| | | | AAGGCGAAGGTGGCGCTGTCGCCTGGCATTCCGTTCGG | | |
| | | | CGCCGCGGTGGGCTCGGGATTTGCGCGGCTGAACTTCG | | |
| | | | CCACCACCCGCGCAATACTGGATCGGGCGATCGAGGCT | | |
| | | | ATCGCGGCCGCCCTGCGCGACATCATCGATTAA | | |
| metC | Bifidobacterium | NZ_AABM020 | ATGAGCATGAACAACATTCCCCAGTCAACGACTGTGAG | 131 | |
| | longum | 00009.1 | CAACGCAACCGCCGACGTCTCTTGCTTTGATGCCAATC | | |
| | | | ACATCGACGTGACGACCATCGAGGATCTGAAGCAGGTC | | |
| | | | GGTTCGGATAAATGGACCCGCTACCCCGGCTGCATCGG | | |
| | | | CGCATTCATCGCCGAGATGGATTACGGTCTGGCACCAT | | |
| | | | GCGTGGCCGAAGCCATCGAAGAGGCCACCGAACGTGGC | | |
| | | | GCGCTCGGCTACATTCCCGACCCGTGGAAGAAGGAGGT | | |
| | | | CGCCCGCTCGTGCGCCGCATGGCAGCGCCGCTACGGCT | | |
| | | | GGGATGTGGATCCGACGTGCATCCGCCCGGTGCCGGAC | | |
| | | | GTGCTGGAGGCGTTCGAAGTGTTCCTGCGCGAGATCGT | | |
| | | | GCGCGCCGGCAACTCCATCGTGGTACCGACTCCGGCCT | | |
| | | | ATATGCCGTTCCTGAGCGTGCCGCGTCTGTATGGCGTG | | |
| | | | GAGGTCCTTGAGATTCCGATGCTGTGCGCGGGCGCCAG | | |
| | | | CGAGAGCAGCGGGCGCAATGATGAATGGCTGTTCGATT | | |
| | | | TCGACGCCATTGAGCAGGCGTTCGCGAACGGCTGCCAT | | |
| | | | GCCTTCGTGCTGTGCAACCCGCACAACCCGATCGGCAA | | |
| | | | GGTATTGACGCGCGAGGAAATGCTGCGATTGTCCGATC | | |
| | | | TGGCCGCCAAGTACAACGTGCGTATATTCTCCGATGAG | | |
| | | | ATTCACGCGCCGTTCGTCTACCAAGGCCACACGCATGT | | |
| | | | GCCATTCGCCTCAATCAACCGGCAGACGGCCATGCAGG | | |
| | | | CTTTCACCTCCACTTCAGCCTCGAAGTCGTTCAACATT | | |
| | | | CCCGGCACCAAGTGCGCGCAGGTGATTCTCACCAATCC | | |
| | | | GGACGATCTGGAACTATGGATGAGGAACGCGGAATGGT | | |
| | | | CCGAGCACCAGACGGCCACCATCGGTGCCATAGCCACC | | |
| | | | ACTGCGGCCTATGACGGCGGCGCGGCATGGTTCGAGGG | | |
| | | | CGTGATGGCATATATCGAGCGCAATATCGCGCTGGTCA | | |
| | | | ACGAGCAGATGCGCACGAGATTCGCCAAGGTGCGCTAT | | |
| | | | GTGGAGCCGCAGGGCACGTATATCGCGTGGCTGGATTT | | |
| | | | CTCGCCACTGGGCATCGGCGACCCGGCCAACTATTTCT | | |
| | | | TTAAGAAGGCCAACGTGGCGTTGACAGACGGCCGTGAA | | |
| | | | TGCGGCGAGGTCGGGCGCGGTTGCGTGCGTATGAACTT | | |
| | | | CGCCATGCCCTACCCGCTACTGGAGGAATGCTTCGACC | | |
| | | | GCATGGCCGCCGCACTTGAGGCGGACGGGTTGTTGTAG | | |
| metC | Lactobacillus | L935262 | ATGCAATATGATTTTAATAAGGTTATAAATCGTAGAGG | 132 | |
| | plantarum | | GACATACAGTACTCAGTGGGATTATATTCAAGATCGCT | | |
| | | | TTGGTCGTTCTGACATTCTACCATTTTCAATTTCAGAT | | |
| | | | ACTGACTTTCCGGTTCCCGTTGGCGTCCAAGAGGCGCT | | |
| | | | TGAACAGCGTATTAAGCATCCTATTTATGGTTATACAC | | |
| | | | GCTGGAATAATGAGGATTACAAAAATAGTATTATTAAT | | |
| | | | TGGTTTAGCTCTCAAAATCAAGTTACTATAAACCCAGA | | |
| | | | TTGGATTTTATATAGTCCCAGTGTTGTTTTTTCAATTG | | |
| | | | CCACCTTTATTCGAATGAAGTCAGCCGTTGGAGAAAGT | | |
| | | | GTAGCGGTCTTCACTCCTATGTATGACGCCTTTTATCA | | |
| | | | TGTGATTGAGGATAATCAGCGGGTGTTAGCGCCGGTCA | | |
| | | | GACTAGGCAGTGCACAACAAGACTATAGTATCGATTGG | | |
| | | | GATACTTTGAAAGCTGTTTTAAAGCAAACAGCAACAAA | | |
| | | | AATTTTACTTTTGACTAATCCACATAATCCTACCGGGA | | |
| | | | AGGTCTTTTCAGATGATGAATTGAAGCATATAGTTGCA | | |
| | | | CTATGTCAACAATATAATGTCTTTATAATTTCAGATGA | | |
| | | | TATTCATAAGGACATTGTGTATCAAAAGGCAGCATATA | | |
| | | | CGCCTGTAACCGAATTTACAACTAAGAATGTGGTCCTA | | |
| | | | TGTTGTTCAGCTACTAAAACTTTTAATACCCCTGGGTT | | |
| | | | GATTGGCGCATATTTATTTGAGCCTGAGGCTGAACTAC | | |
| | | | GTGAGATGTTTTTATGTGAATTAAAGCAAAAAAATGCT | | |
| | | | TTATCATCAGCTAGCATCCTTGGAATTGAATCTCAGAT | | |
| | | | GGCTGCTTATAATACTGGAAGTGACTATTTAGTACAAC | | |
| | | | TCATAACGTATTTGCAAAATAACTTTGATTATCTATCT | | |
| | | | ACTTTCTTAAAAAGTCAGTTACCAGAGATTAGATTTAA | | |
| | | | GCAGCCTGAAGCGACTTATTTGGCTTGGATGGATGTCT | | |
| | | | CGCAATTGGGGCTAACGGCTGAAAAACTACAAGATAAA | | |
| | | | CTTGTTAATACGGGTCGAGTTGGGATCATGTCGGGGAC | | |
| | | | AACATATGGTGACAGTCATTATTTACGTATGAATATTG | | |
| | | | CTTGTCCTATTTCTAAATTGCAGGAAGGACTGAAAAGA | | |
| | | | ATGGAGTACGGGATCCGTTCGTAA | | |
| metC | Coryne- | F276227 | ATGCGATTTCCTGAACTCGAAGAATTGAAGAATCGCCG | 255 | |
| | bacterium | | GACCTTGAAATGGACCCGGTTTCCAGAAGACGTGCTTC | | |
| | glutamicum | | CTTTGTGGGTTGCGGAAAGTGATTTTGGCACCTGCCCG | | |
| | | | CAGTTGAAGGAAGCTATGGCAGATGCCGTTGAGCGCGA | | |
| | | | GGTCTTCGGATACCCACCAGATGCTACTGGGTTGAATG | | |
| | | | ATGCGTTGACTGGATTCTACGAGCGTCGCTATGGGTTT | | |
| | | | GGCCCAAATCCGGAAAGTGTTTTCGCCATTCCGGATGT | | |
| | | | GGTTCGTGGCCTGAAGCTTGCCATTGAGCATTTCACTA | | |
| | | | AGCCTGGTTCGGCGATCATTGTGCCGTTGCCTGCATAC | | |
| | | | CCTCCTTTCATTGAGTTGCCTAAGGTGACTGGTCGTCA | | |
| | | | GGCGATCTACATTGATGCGCATGAGTACGATTTGAAGG | | |
| | | | AAATTGAGAAGGCCTTCGCTGACGGTGCGGGATCACTG | | |
| | | | TTGTTCTGCAATCCACACAACCCACTGGGCACGGTCTT | | |
| | | | TTCTGAAGAGTACATCCGCGAGCTCACCGATATTGCGG | | |
| | | | CGAAGTACGATGCCCGCATCATCGTCGATGAGATCCAC | | |
| | | | GCGCCACTGGTTTATGAAGGCACCCATGTGGTTGCTGC | | |
| | | | TGGTGTTTCTGAGAACGCTGCAAACACTTGCATCACCA | | |
| | | | TCACCGCAACTTCTAAGGCGTGGAACACTGCTGGTTTG | | |
| | | | AAGTGTGCTCAGATCTTCTTCAGTAATGAAGCCGATGT | | |
| | | | GAAGGCCTGGAAGAATTTGTCGGATATTACCCGTGACG | | |
| | | | GTGTGTCCATCCTTGGATTGATCGCTGCGGAGACAGTG | | |
| | | | TACAACGAGGGCGAAGAATTCCTTGATGAGTCAATTCA | | |
| | | | GATTCTCAAGGACAACCGTGACTTTGCGGCTGCTGAAC | | |
| | | | TGGAAAAGCTTGGCGTGAAGGTCTACGCACCGGACTCC | | |
| | | | ACTTATTTGATGTGGTTGGACTTCGCTGGCACCAAGAT | | |
| | | | CGAAGAGGCGCCTTCTAAAATTCTTCGTGAGGAGGGTA | | |
| | | | AGGTCATGCTGAATGATGGCGCAGCTTTTGGTGGTTTC | | |
| | | | ACCACCTGCGCTCGTCTTAATTTTGCGTGTTCCAGAGA | | |
| | | | GACCCTTGAGGAGGGGCTGCGCCGTATCGCCAGCGTGT | | |
| | | | TGTAA | | |
| metC | Escherichia coli | E000383 | ATGGCGGACAAAAAGCTTGATACTCAACTGGTGAATGC | 256 | |
| | | | AGGACGCAGCAAAAAATACACTCTCGGCGCGGTAAATA | | |
| | | | GCGTGATTCAGCGCGCTTCTTCGCTGGTCTTTGACAGT | | |
| | | | GTAGAAGCCAAAAAACACGCGACACGTAATCGCGCCAA | | |
| | | | TGGAGAGTTGTTCTATGGACGGCGCGGAACGTTAACCC | | |
| | | | ATTTCTCCTTACAACAAGCGATGTGTGAACTGGAAGGT | | |
| | | | GGCGCAGGCTGCGTGCTATTTCCCTGCGGGGCGGCAGC | | |
| | | | GGTTGCTAATTCCATTCTTGCTTTTATCGAACAGGGCG | | |
| | | | ATCATGTGTTGATGACCAACACCGCCTATGAACCGAGT | | |
| | | | CAGGATTTCTGTAGCAAAATCCTCAGCAAACTGGGCGT | | |
| | | | AACGACATCATGGTTTGATCCGCTGATTGGTGCCGATA | | |
| | | | TCGTTAAGCATCTGCAGCCAAACACTAAAATCGTGTTT | | |
| | | | CTGGAATCGCCAGGCTCCATCACCATGGAAGTCCACGA | | |
| | | | CGTTCCGGCGATTGTTGCCGCCGTACGCAGTGTGGTGC | | |
| | | | CGGATGCCATCATTATGATCGACAACACCTGGGCAGCC | | |
| | | | GGTGTGCTGTTTAAGGCGCTGGATTTTGGCATCGATGT | | |
| | | | TTCTATTCAAGCCGCCACCAAATATCTGGTTGGGCATT | | |
| | | | CAGATGCGATGATTGGCACTGCCGTGTGCAATGCCCGT | | |
| | | | TGCTGGGAGCAGCTACGGGAAAATGCCTATCTGATGGG | | |
| | | | CCAGATGGTCGATGCCGATACCGCCTATATAACCAGCC | | |
| | | | GTGGCCTGCGCACATTAGGTGTGCGTTTGCGTCAACAT | | |
| | | | CATGAAAGCAGTCTGAAAGTGGCTGAATGGCTGGCAGA | | |
| | | | ACATCCGCAAGTTGCGCGAGTTAACCACCCTGCTCTGC | | |
| | | | CTGGCAGTAAAGGTCACGAATTCTGGAAACGAGACTTT | | |
| | | | ACAGGCAGCAGCGGGCTATTTTCCTTTGTGCTTAAGAA | | |
| | | | AAAACTCAATAATGAAGAGCTGGCGAACTATCTGGATA | | |
| | | | ACTTCAGTTTATTCAGCATGGCCTACTCGTGGGGCGGG | | |
| | | | TATGAATCGTTGATCCTGGCAAATCAACCAGAACATAT | | |
| | | | CGCCGCCATTCGCCCACAAGGCGAGATCGATTTTAGCG | | |
| | | | GGACCTTGATTCGCCTGCATATTGGTCTGGAAGATGTC | | |
| | | | GACGATCTGATTGCCGATCTGGACGCCGGTTTTGCGCG | | |
| | | | AATTGTA | | |
| gdh | Streptomyces | L939121.1 | GTGCCCGCCGTGCCAGAAAGGGCCCCTGTGACGACGCG | 133 | |
| | coelicolor | | AAGCGAGACGCAGTCCACCCTCGACCACCTCCTCACCG | | |
| | | | AGATCGAGCTGCGCAACCCGGCCCAGCCCGAGTTCCAC | | |
| | | | CAGGCGGCCCACGAGGTCCTGGAGACCCTGGCGCCGGT | | |
| | | | CGTCGCGGCCCGCCCCGAGTACGCCGAGCCGGGCCTCA | | |
| | | | TCGAGCGGCTGGTCGAGCCGGAGCGCCAGGTGATGTTC | | |
| | | | CGGGTGCCGTGGCAGGACGACCAGGGCCGCGTCCGCGT | | |
| | | | CAACCGGGGCTTCCGGGTCGAGTTCAACAGCGCGCTGG | | |
| | | | GCCCGTACAAGGGCGGTCTGCGCTTCCATCCGTCCGTC | | |
| | | | AACCTGGGCGTCATCAAGTTCCTGGGCTTCGAGCAGAT | | |
| | | | CTTCAAGAACGCGCTGACCGGCCTCGGCATCGGCGGCG | | |
| | | | GCAAGGGCGGCAGCGACTTCGACCCGCACGGGCGCAGC | | |
| | | | GACGCGGAGGTCATGCGGTTCTGCCAGTCCTTCATGAC | | |
| | | | GGAGCTGTACCGGCACATCGGCGAGCACACGGACGTCC | | |
| | | | CGGCGGGGGACATCGGCGTCGGGGGCCGCGAGATCGGC | | |
| | | | TACCTCTTCGGCCAGTACCGGCGGATCACCAACCGCTG | | |
| | | | GGAGTCCGGCGTCCTGACCGGCAAGGGCCAGGGCTGGG | | |
| | | | GCGGCTCGCTGATCCGCCCGGAGGCGACCGGCTACGGC | | |
| | | | AACGTGCTGTTCGCGGCGGCGATGCTGCGGGAGCGCGG | | |
| | | | CGAGGACCTGGAGGGCCAGACCGCGGTCGTCTCCGGCT | | |
| | | | CCGGCAACGTGGCGATCTACACCATCGAGAAGCTGACC | | |
| | | | GCCCTCGGCGCCAACGCCGTCACCTGCTCGGACTCCTC | | |
| | | | CGGCTACGTCGTCGACGAGAAGGGCATCGACCTCGACC | | |
| | | | TGCTCAAGCAGATCAAGGAGGTCGAGCGCGGCCGCGTC | | |
| | | | GACGCGTACGCCGAGCGCCGGGGCGCCTCGGCCCGCTT | | |
| | | | CGTGCCCGGCGGCAGCGTCTGGGACGTTCCGGCCGACC | | |
| | | | TTGCCCTCCCCTCCGCCACGCAGAACGAGCTGGACGAG | | |
| | | | AACGCCGCCGCCACGCTCGTCCGCAACGGCGTCAAGGC | | |
| | | | GGTCTCCGAGGGCGCGAACATGCCGACCACCCCCGAGG | | |
| | | | CCGTCCACCTGCTCCAGAAGGCGGGCGTCGCCTTCGGC | | |
| | | | CCCGGCAAGGCGGCCAACGCGGGCGGCGTCGCGGTCAG | | |
| | | | CGCCCTGGAGATGGCGCAGAACCACGCCCGTACCTCGT | | |
| | | | GGACGGCGGCGCGGGTCGAGGAGGAGCTGGCCGACATC | | |
| | | | ATGACCAGCATCCACACCACCTGCCACGAGACCGCCGA | | |
| | | | GCGCTACGACGCCCCCGGCGACTACGTCACCGGCGCGA | | |
| | | | ACATCGCCGGCTTCGAGCGGGTGGCCGACGCGATGCTG | | |
| | | | GCGCAGGGCGTCATCTGA | | |
| gdh | Thermobifida | NZ_AAAQ010 | GTGCGCCCCGAACCGGAGGCGACCATGTCGGCGAATCT | 134 | |
| | fusca | 00033.1 | CGATGAGAAACTGTCCCCGATCTACGAGGAAATCCTGC | | |
| | | | GGCGTAACCCGGGGGAGGTCGAGTTCCACCAGGCTGTT | | |
| | | | CGCGAAGTCCTGGAGTGCCTCGGCCCCGTGGTGGCCAA | | |
| | | | GAACCCTGACATCAGCCACGCCAAGATCATCGAGCGGC | | |
| | | | TCTGTGAGCCGGAGCGCCAGCTGATCTTCCGGGTGCCC | | |
| | | | TGGATGGACGACTCCGGTGAGATCCACGTCAACCGGGG | | |
| | | | TTTCCGGGTGGAGTTCAGCAGCTCTTTGGGACCTTACA | | |
| | | | AGGGCGGGCTGCGGTTCCACCCGTCGGTGAACCTGAGC | | |
| | | | ATCATCAAGTTCCTCGGGTTCGAGCAGATCTTCAAGAA | | |
| | | | CTCGCTGACCGGATTGCCGATCGGCGGTGCGAAAGGCG | | |
| | | | GCAGCGACTTCGACCCGAAGGGCCGTTCCGACGCCGAG | | |
| | | | ATCATGCGGTTCTGCCAGTCGTTCATGACGGAGCTGTA | | |
| | | | CCGGCACCTGGGTGAGCACACGGACGTGCCTGCCGGTG | | |
| | | | ACATCGGCGTGGGCCAGCGTGAGATCGGCTACCTGTTC | | |
| | | | GGCCAGTACAAGCGGATCACCAACCGCTACGAGTCGGG | | |
| | | | CGTGTTCACCGGTAAGGGCCTCAGTTGGGGCGGTTCCC | | |
| | | | AGGTGCGTCGTGAGGCCACCGGGTACGGCTGTGTGCTC | | |
| | | | TTCACTGCGGAGATGCTGCGAGCCCGCGGCGACTCGCT | | |
| | | | GGAAGGCAAGCGGGTCTCGGTGTCGGGTTCGGGCAATG | | |
| | | | TGGCGATCTACGCGATCGAGAAGGCCCAGCAGCTCGGC | | |
| | | | GCGCATGTGGTGACCTGCTCGGACTCCAACGGCTACGT | | |
| | | | GGTGGACGAGAAGGGGATCGACCTGGAGCTGCTCAAGC | | |
| | | | AGGTCAAGGAGGTCGAACGCGGCCGGGTGTCCGACTAC | | |
| | | | GCCAAGCGGCGCGGCTCCCACGTCCGCTACATCGACTC | | |
| | | | GTCGTCGTCCAGCGTGTGGGAGGTGCCCTGCGACATCG | | |
| | | | CGCTGCCGTGCGCGACGCAGAACGAGCTGACCGGCCGC | | |
| | | | GACGCTATCACCCTGGTGCGCAACGGGGTGGGCGCGGT | | |
| | | | GGCGGAGGGCGCGAACATGCCCACGACCCCGGAGGGGA | | |
| | | | TCCGGGTGTTCGCGGAGGCGGGCGTAGCGTTCGCGCCG | | |
| | | | GGCAAGGCCGCGAACGCGGGCGGGGTGGCGACGAGCGC | | |
| | | | GTTGGAGATGCAGCAGAACGCGTCCCGCGACTCGTGGT | | |
| | | | CGTTCGAGTACACCGAGAAGCGGCTCGCGGAAATCATG | | |
| | | | CGCCACATCCACGACACCTGCTATGAGACGGCGGAACG | | |
| | | | CTATGGGCGGCCCGGCGACTATGTGGCAGGTGCCAACA | | |
| | | | TCGCTGCTTTCGAGATCGTCGCTGAGGCGATGCTCGCT | | |
| | | | CAGGGCCTGATCTGA | | |
| gdh | Lactobacillus | AL935255.1 | TTGAGTCAAGCAACCGATTATGTCCAACATGTTTACCA | 135 | |
| | plantarum | | AGTCATTGAACACCGTGATCCGAACCAAACCGAATTTT | | |
| | | | TAGAGGCCATCAACGACGTCTTCAAAACGATCACGCCA | | |
| | | | GTCCTCGAACAACATCCAGAATATATCGAAGCCAATAT | | |
| | | | TTTGGAACGTTTGACCGAACCAGAACGGATTATTCAAT | | |
| | | | TCCGGGTTCCTTGGCTCGACGATGCTGGTCATGCACGA | | |
| | | | GTCAACCGTGGGTTCCGAGTACAATTTAACTCAGCAAT | | |
| | | | CGGTCCTTACAAGGGCGGCTTACGGTTACACCCATCCG | | |
| | | | TTAATCTGAGTATCGTCAAATTCTTGGGCTTTGAACAG | | |
| | | | ATCTTCAAAAATGCCCTGACCGGCCTACCAATTGGCGG | | |
| | | | TGGTAAAGGGGGCTCTGATTTCGACCCTAAGGGCAAAT | | |
| | | | CAGACAACGAAATTATGCGCTTCTGTCAGAGTTTCATG | | |
| | | | ACCGAACTGAGCAAGTACATTGGTCTCGATACTGACGT | | |
| | | | TCCTGCTGGTGATATCGGTGTTGGTGGCCGCGAAATCG | | |
| | | | GCTTTTTATACGGCCAATACAAGCGACTCCGGGGCGCT | | |
| | | | GACCGCGGCGTACTCACCGGTAAAGGATTGAACTATGG | | |
| | | | CGGTTCGTTAGCCCGGACTGAAGCTACCGGTTATGGTC | | |
| | | | TCGCCTACTATACCAACGAAATGCTCAAGGCCAACCAA | | |
| | | | CTTTCCTTCCCTGGTCAACGCGTTGCCATTTCTGGTGC | | |
| | | | TGGTAATGTCGCCATCTACGCGATTCAAAAGGTTGAAG | | |
| | | | AACTCGGTGGCAAGGTGATTACTTGCTCCGACTCAAAC | | |
| | | | GGTTACGTTATTGACGAAAACGGTATCGACTTCAAGAT | | |
| | | | CGTTAAGCAGATCAAGGAAGTTGAACGCGGTCGTATCA | | |
| | | | AAGACTATGCCGACCGTGTAGCCAGTGCCAGCTATTAC | | |
| | | | GAAGGTTCCGTCTGGGACGCCCAAGTAGCTTATGATAT | | |
| | | | CGCGTTACCTTGCGCCACCCAAAACGAAATCAGCGGTG | | |
| | | | ATCAAGCCAAGAACTTGATTGCCAATGGTGCCAAGGTC | | |
| | | | GTTGCCGAAGGGGCTAACATGCCTAGCAGTCCAGAAGC | | |
| | | | CATTGCGACATACCAAGCTGCCAGCTTGCTATATGGTC | | |
| | | | CGGCCAAAGCTGCCAATGCTGGTGGCGTTGCCGTTTCC | | |
| | | | GCCCTTGAAATGAGCCAAAATAGTATGCGTTTGAGCTG | | |
| | | | GACTTTTGAAGAAGTCGATAATCGCCTCAAGCAAATCA | | |
| | | | TGCAAGATATCTTTGCACACTCCGTTGCCGCTGCCGAC | | |
| | | | GAATACCACGTTAGCGGTGATTACCTGAGTGGTGCTAA | | |
| | | | CATTGCTGGCTTCACAAAAGTTGCTGACGCCATGTTAG | | |
| | | | CGCAAGGCTTAGTTTAA | | |
| gdh | Corynebacterium | X59404 | ATGACAGTTGATGAGCAGGTCTCTAACTATTACGACAT | 257 | |
| | glutamicum | | GCTTCTGAAGCGCAATGCTGGCGAGCCTGAATTTCACC | | |
| | | | AGGCAGTGGCAGAGGTTTTGGAATCTTTGAAGCTCGTC | | |
| | | | CTGGAAAAGGACCCTCATTACGCTGATTACGGTCTCAT | | |
| | | | CCAGCGCCTGTGCGAGCCTGAGCGTCAGCTCATCTTCC | | |
| | | | GTGTGCCTTGGGTTGATGACCAGGGCCAGGTCCACGTC | | |
| | | | AACCGTGGTTTCCGCGTGCAGTTCAACTCTGCACTTGG | | |
| | | | ACCATACAAGGGCGGCCTGCGCTTCCACCCATCTGTAA | | |
| | | | ACCTGGGCATTGTGAAGTTCCTGGGCTTTGAGCAGATC | | |
| | | | TTTAAAAACTCCCTAACCGGCCTGCCAATCGGTGGTGG | | |
| | | | CAAGGGTGGATCCGACTTCGACCCTAAGGGCAAGTCCG | | |
| | | | ATCTGGAAATCATGCGTTTCTGCCAGTCCTTCATGACC | | |
| | | | GAGCTACACCGCCACATCGGTGAGTACCGCGACGTTCC | | |
| | | | TGCAGGTGACATCGGAGTTGGTGGCCGCGAGATCGGTT | | |
| | | | ACCTGTTTGGCCACTACCGTCGCATGGCTAACCAGCAC | | |
| | | | GAGTCCGGCGTTTTGACCGGTAAGGGCCTGACCTGGGG | | |
| | | | TGGATCCCTGGTCCGCACCGAGGCAACTGGCTACGGCT | | |
| | | | GCGTTTACTTCGTGAGTGAAATGATCAAGGCTAAGGGC | | |
| | | | GAGAGCATCAGCGGCCAGAAGATCATCGTTTCCGGTTC | | |
| | | | CGGCAACGTAGCAACCTACGCGATTGAAAAGGCTCAGG | | |
| | | | AACTCGGCGCAACCGTTATTGGTTTCTCCGATTCCAGC | | |
| | | | GGTTGGGTTCATACCCCTAACGGCGTTGACGTGGCTAA | | |
| | | | GCTCCGCGAAATCAAGGAAGTTCGTCGCGCACGCGTAT | | |
| | | | CCGTGTACGCCGACGAAGTTGAAGGCGCAACCTACCAC | | |
| | | | ACCGACGGTTCCATCTGGGATCTCAAGTGCGATATCGC | | |
| | | | TCTTCCTTGTGCAACTCAGAACGAGCTCAACGGCGAGA | | |
| | | | ACGCTAAGACTCTTGCAGACAACGGCTGCCGTTTCGTT | | |
| | | | GCTGAAGGCGCGAACATGCCTTCCACCCCTGAGGCTGT | | |
| | | | TGAGGTCTTCCGTGAGCGCGACATCCGCTTCGGACCAG | | |
| | | | GCAAGGCCACCCCTGAGGCTGTTGAGGTCTTCCGTGAG | | |
| | | | CGCGACATCCGCTTCGGACCAGGCAAGGCAGTCAACGT | | |
| | | | CGGTGGCGTTGCAACCTCCGCTCTGGAGATGCAGCAGA | | |
| | | | ACGCTTCGCGCGAGACCTGTGCAGAGACCGCAGCAGAG | | |
| | | | TATGGACACGAGAACGATTACGTTGTCGGCGCTAACAT | | |
| | | | TGCTGGCTTCAAGAAGGTAGCTGACGCGATGCTGGCAC | | |
| | | | AGGGCGTCATCTAA | | |
| gdh | Escherichia coli | D90819 | ATGGATCAGACATATTCTCTGGAGTCATTCCTCAACCA | 258 | |
| | | | TGTCCAAAAGCGCGACCCGAATCAAACCGAGTTCGCGC | | |
| | | | AAGCCGTTCGTGAAGTAATGACCACACTCTGGCCTTTT | | |
| | | | CTTGAACAAAATCCAAAATATCGCCAGATGTCATTACT | | |
| | | | GGAGCGTCTGGTTGAACCGGAGCGCGTGATCCAGTTTC | | |
| | | | GCGTGGTATGGGTTGATGATCGCAACCAGATACAGGTC | | |
| | | | AACCGTGCATGGCGTGTGCAGTTCAGCTCTGCCATCGG | | |
| | | | CCCGTACAAAGGCGGTATGCGCTTCCATCCGTCAGTTA | | |
| | | | ACCTTTCCATTCTCAAATTCCTCGGCTTTGAACAAACC | | |
| | | | TTCAAAAATGCCCTGACTACTCTGCCGATGGGCGGTGG | | |
| | | | TAAAGGCGGCAGCGATTTCGATCCGAAAGGAAAAAGCG | | |
| | | | AAGGTGAAGTGATGCGTTTTTGCCAGGCGCTGATGACT | | |
| | | | GAACTGTATCGCCACCTGGGCGCGGATACCGACGTTCC | | |
| | | | GGCAGGTGATATCGGGGTTGGTGGTCGTGAAGTCGGCT | | |
| | | | TTATGGCGGGGATGATGAAAAAGCTCTCCAACAATACC | | |
| | | | GCCTGCGTCTTCACCGGTAAGGGCCTTTCATTTGGCGG | | |
| | | | CAGTCTTATTCGCCCGGAAGCTACCGGCTACGGTCTGG | | |
| | | | TTTATTTCACAGAAGCAATGCTAAAACGCCACGGTATG | | |
| | | | GGTTTTGAAGGGATGCGCGTTTCCGTTTCTGGCTCCGG | | |
| | | | CAACGTCGCCCAGTACGCTATCGAAAAAGCGATGGAAT | | |
| | | | TTGGTGCTCGTGTGATCACTGCGTCAGACTCCAGCGGC | | |
| | | | ACTGTAGTTGATGAAAGCGGATTCACGAAAGAGAAACT | | |
| | | | GGCACGTCTTATCGAAATCAAAGCCAGCCGCGATGGTC | | |
| | | | GAGTGGCAGATTACGCCAAAGAATTTGGTCTGGTCTAT | | |
| | | | CTCGAAGGCCAACAGCCGTGGTCTCTACCGGTTGATAT | | |
| | | | CGCCCTGCCTTGCGCCACCCAGAATGAACTGGATGTTG | | |
| | | | ACGCCGCGCATCAGCTTATCGCTAATGGCGTTAAAGCC | | |
| | | | GTCGCCGAAGGGGCAAATATGCCGACCACCATCGAAGC | | |
| | | | GACTGAACTGTTCCAGCAGGCAGGCGTACTATTTGCAC | | |
| | | | CGGGTAAAGCGGCTAATGCTGGTGGCGTCGCTACATCG | | |
| | | | GGCCTGGAAATGGCACAAAACGCTGCGCGCCTGGGCTG | | |
| | | | GAAAGCCGAGAAAGTTGACGCACGTTTGCATCACATCA | | |
| | | | TGCTGGATATCCACCATGCCTGTGTTGAGCATGGTGGT | | |
| | | | GAAGGTGAGCAAACCAACTACGTGCAGGGCGCGAACAT | | |
| | | | TGCCGGTTTTGTGAAGGTTGCCGATGCGATGCTGGCGC | | |
| | | | AGGGTGTGATT | | |
| ddh | Bacillus | AB030649 | ATGAGTGCAATTCGAGTAGGTATTGTCGGTTATGGAAA | 136 | |
| | sphaericus | | TTTAGGGCGCGGTGTTGAATTCGCTATTTCACAAAATC | | |
| | | | CAGATATGGAATTAGTAGCGGTATTCACTCGTCGCGAT | | |
| | | | CCTTCAACAGTGAGCGTTGCAAGTAACGCGAGCGTATA | | |
| | | | TTTAGTAGATGATGCTGAAAAATTTCAAGATGACATTG | | |
| | | | ATGTAATGATTTTATGTGGTGGCTCTGCAACAGATTTA | | |
| | | | CCTGAGCAAGGTCCACACTTTGCGCAATGGTTTAATAC | | |
| | | | AATTGATAGTTTTGATACTCATGCGAAAATTCCAGAGT | | |
| | | | TTTTCGATGCGGTTGACGCTGCTGCTCAAAAATCTGGT | | |
| | | | AAAGTATCTGTTATCTCTGTAGGTTGGGATCCAGGTCT | | |
| | | | ATTTTCTTTAAATCGTGTTTTAGGCGAGGCAGTATTAC | | |
| | | | CTGTAGGTACAACGTATACATTCTGGGGTGATGGCTTA | | |
| | | | AGTCAAGGTCACTCGGATGCAGTTCGTCGTATTGAAGG | | |
| | | | GGTTAAAAATGCTGTACAGTATACATTACCTATCAAAG | | |
| | | | ATGCTGTTGAACGTGTTCGTAATGGTGAGAATCCAGAG | | |
| | | | CTTACTACACGTGAAAAGCATGCACGTGAATGCTGGGT | | |
| | | | AGTGCTTGAAGAAGGTGCAGATGCGCCAAAAGTAGAGC | | |
| | | | AAGAAATTGTAACAATGCCGAACTATTTCGATGAGTAT | | |
| | | | AACACAACTGTAAACTTTATCTCTGAAGATGAGTTTAA | | |
| | | | TGCCAACCATACAGGCATGCCACATGGTGGCTTCGTTA | | |
| | | | TTCGTAGTGGTGAAAGCGGCGCTAATGATAAACAAATT | | |
| | | | TTAGAATTCTCGTTAAAACTTGAAAGTAATCCAAACTT | | |
| | | | CACGTCAAGTGTCCTTGTGGCTTATGCACGTGCAGCAC | | |
| | | | ACCGCTTAAGTCAAGCGGGTGAAAAAGGTGCAAAAACA | | |
| | | | GTATTCGATATTCCGTTCGGTCTGTTATCTCCAAAATC | | |
| | | | AGCTGCACAATTACGTAAGGAACTATTATAA | | |
| dtsR1 | Thermobifida | NZ_AAAQ010 | ATGGCGACCCAAGCCCCTGAACCGCTGCCCGCGGACCA | 137 | |
| | fusca | 00037.1 | GATCGACATTCGCACCACCGCGGGCAAACTCGCAGACC | | |
| | | | TGCAGCGACGCCGCTACGAGGCGGTCCACGCAGGCTCC | | |
| | | | GAACGAGCCGTAGCAAAACAGCACGCCAAGGGCAAGAT | | |
| | | | GACCGCCCGCGAGCGCATCGACGCCCTGCTCGACCCGG | | |
| | | | GCTCCTTCGTGGAGTTCGACGCCTTCGCGCGTCACCGG | | |
| | | | TCCACCAACTTCGGCTTGGAGAAGAACCGCCCCTACGG | | |
| | | | CGACGGCGTCGTCACCGGCTACGGCACCATCGACGGCC | | |
| | | | GACCGGTCGCCGTGTTCAGCCAGGACGTCACCGTCTTC | | |
| | | | GGCGGTTCCCTCGGCGAGGTCTACGGCGAGAAGATCGT | | |
| | | | CAAAGTCCTCGACCATGCGCTCAAAACCGGCTGCCCGG | | |
| | | | TCATCGGCATCAACGAAGGCGGCGGCGCGCGCATCCAA | | |
| | | | GAGGGCGTGGTGGCGCTGGGCCTCTACGCCGAGATTTT | | |
| | | | CAAACGCAACACCCACGCCTCCGGGGTCATCCCCCAGA | | |
| | | | TCTCGCTCGTCATGGGGGCAGCAGCAGGCGGCCACGTC | | |
| | | | TACTCGCCCGCCCTCACCGACTTCATCGTCATGGTCGA | | |
| | | | CCAGACCTCCCAGATGTTCATCACCGGGCCCGACGTCA | | |
| | | | TCAAGACGGTCACCGGTGAAGACGTCACCATGGAGGAG | | |
| | | | CTGGGCGGCGCACGCACCCACAACACCAAGTCGGGCGT | | |
| | | | GGCCCACTACATGGCCTCCGACGAGCACGACGCCCTGG | | |
| | | | AGTACGTCAAGGCGCTGCTGTCCTACCTGCCCTCCAAC | | |
| | | | AACCTGGACGAGCCGCCCGTCGAACCCGTCCAGGTGAC | | |
| | | | CCTGGAGGTGACCGAGGAAGACCGGGAGCTGGACACCT | | |
| | | | TCATCCCCGACTCGGCCAACCAGCCCTACGACATGCGC | | |
| | | | CGCGTCATCGAACACATCGTGGACGACGGGGAGTTCCT | | |
| | | | GGAAGTCCACGAACTGTTCGCGCAGAACATCATCGTGG | | |
| | | | GCTTCGGCCGGGTCGAAGGCCACCCGGTAGGTGTCGTC | | |
| | | | GCCAACCAGCCGATGAACCTCGCGGGCTGCCTGGACAT | | |
| | | | CGACGCCTCCGAGAAAGCCGCCCGGTTCGTCCGCACCT | | |
| | | | GCGACGCCTTCAACATCCCCGTGCTGACCCTGGTCGAC | | |
| | | | GTCCCCGGCTTCCTGCCCGGAACCGACCAGGAGTTCGG | | |
| | | | CGGCATCATCCGGCGCGGCGCCAAACTGCTCTACGCCT | | |
| | | | ACGCTGAGGCGACCGTCCCCCTGGTGACCATCATCACC | | |
| | | | CGCAAAGCGTTCGGCGGCGCCTACGACGTCATGGGCTC | | |
| | | | CAAGCACCTGGGTGCAGACATCAACCTGGCGTGGCCGA | | |
| | | | CCGCGCAGATCGCGGTCATGGGAGCCCAGGGTGCCGTC | | |
| | | | AACATCCTGCACCGGCGTACCCTCGCCGCCGCCGACGA | | |
| | | | CGTCGAAGCGACCCGCGCCCAGCTCATCGCCGAATACG | | |
| | | | AAGACACTCTGCTCAACCCGTACAGCGCGGCCGAACGG | | |
| | | | GGCTACGTCGACAGCGTCATCATGCCGTCGGAAACCCG | | |
| | | | CACGTCCGTCATCAAAGCCCTGCGTGCGCTGCGCGGCA | | |
| | | | AACGCAAGCAGCTCCCGCCCAAGAAGCACGGGAATATC | | |
| | | | CCACTCTGA | | |
| dtsR1 | Streptomyces | AF113605.1 | ATGTCCGAGCCGGAAGAGCAGCAGCCCGACATCCACAC | 138 | |
| | coelicolor | | GACCGCGGGCAAGCTCGCGGATCTCAGGCGCCGTATCG | | |
| | | | AGGAAGCGACGCACGCCGGTTCCGCACGCGCCGTCGAG | | |
| | | | AAGCAGCACGCCAAGGGCAAGCTGACGGCTCGTGAACG | | |
| | | | CATCGACCTCCTCCTCGACGAGGGTTCCTTCGTCGAGC | | |
| | | | TGGACGAGTTCGCCCGGCACCGCTCCACCAACTTCGGC | | |
| | | | CTCGACGCCAACCGCCCCTACGGCGACGGCGTCGTCAC | | |
| | | | CGGCTACGGCACCGTCGACGGCCGCCCCGTGGCCGTCT | | |
| | | | TCTCCCAGGACTTCACCGTCTTCGGCGGCGCGCTGGGC | | |
| | | | GAGGTCTACGGCCAGAAGATCGTCAAGGTGATGGACTT | | |
| | | | CGCCCTCAAGACCGGCTGCCCGGTCGTCGGCATCAACG | | |
| | | | ACTCCGGCGGCGCCCGCATCCAGGAGGGCGTGGCCTCC | | |
| | | | CTCGGCGCCTACGGCGAGATCTTCCGCCGCAACACCCA | | |
| | | | CGCCTCCGGCGTGATCCCGCAGATCAGCCTGGTCGTCG | | |
| | | | GCCCGTGTGCGGGCGGCGCGGTGTACTCCCCCGCGATC | | |
| | | | ACCGACTTCACGGTGATGGTGGACCAGACCAGCCACAT | | |
| | | | GTTCATCACCGGTCCCGACGTCATCAAGACGGTCACCG | | |
| | | | GCGAGGACGTCGGCTTCGAGGAGCTGGGCGGCGCCCGC | | |
| | | | ACCCACAACTCCACCTCGGGCGTGGCCCACCACATGGC | | |
| | | | CGGCGACGAGAAGGACGCGGTCGAGTACGTCAAGCAGC | | |
| | | | TCCTGTCGTACCTGCCGTCCAACAACCTCTCCGAGCCC | | |
| | | | CCCGCCTTCCCGGAGGAGGCGGACCTCGCGGTCACGGA | | |
| | | | CGAGGACGCCGAGCTGGACACGATCGTCCCGGACTCGG | | |
| | | | CGAACCAGCCCTACGACATGCACTCCGTCATCGAGCAC | | |
| | | | GTCCTGGACGACGCCGAGTTCTTCGAGACGCAACCCCT | | |
| | | | CTTCGCGCCGAACATCCTCACCGGCTTCGGCCGCGTGG | | |
| | | | AGGGCCGCCCGGTCGGCATCGTCGCCAACCAGCCCATG | | |
| | | | CAGTTCGCCGGCTGCCTGGACATCACGGCCTCCGAGAA | | |
| | | | GGCGGCCCGCTTCGTGCGCACCTGCGACGCCTTCAACG | | |
| | | | TCCCCGTCCTCACCTTCGTGGACGTCCCCGGCTTCCTG | | |
| | | | CCCGGCGTCGACCAGGAGCACGACGGCATCATCCGCCG | | |
| | | | CGGCGCCAAGCTGATCTTCGCCTACGCCGAGGCCACGG | | |
| | | | TGCCGCTCATCACGGTCATCACCCGCAAGGCCTTCGGC | | |
| | | | GGCGCCTACGACGTCATGGGCTCCAAGCACCTGGGCGC | | |
| | | | CGACCTCAACCTGGCCTGGCCCACCGCCCAGATCGCCG | | |
| | | | TCATGGGCGCCCAAGGCGCGGTCAACATCCTGCACCGC | | |
| | | | CGCACCATCGCCGACGCCGGTGACGACGCCGAGGCCAC | | |
| | | | CCGGGCCCGCCTGATCCAGGAGTACGAGGACGCCCTCC | | |
| | | | TCAACCCCTACACGGCGGCCGAACGCGGCTACGTCGAC | | |
| | | | GCCGTGATCATGCCCTCCGACACTCGCCGCCACATCGT | | |
| | | | CCGCGGCCTGCGCCAGCTGCGCACCAAGCGCGAGTCCC | | |
| | | | TGCCCCCGAAGAAGCACGGCAACATCCCCCTGTAA | | |
| dtsR1 | Mycobacterium | Z92771.1 | ATGACAAGCGTTACCGACCGCTCGGCTCATTCCGCAGA | 139 | |
| | tuberculosis | | GCGGTCCACCGAGCACACCATCGACATCCACACCACCG | | |
| | (use this to | | CGGGCAAGCTGGCGGAGCTGCACAAACGCAGGGAAGAG | | |
| | clone M. | | TCGCTGCACCCCGTCGGTGAGGATGCCGTCGAAAAAGT | | |
| | smegmatis | | ACACGCCAAGGGCAAGCTGACGGCTCGCGAGCGTATCT | | |
| | gene) | | ACGCGTTGCTGGATGAGGATTCGTTCGTCGAGCTGGAC | | |
| | | | GCGCTGGCCAAACACCGCAGCACCAACTTCAATCTCGG | | |
| | | | TGAAAAACGCCCGCTCGGCGACGGCGTGGTCACCGGCT | | |
| | | | ACGGCACCATCGACGGGCGCGACGTGTGCATCTTCAGC | | |
| | | | CAGGACGCCACGGTGTTTGGCGGCAGCCTTGGCGAGGT | | |
| | | | GTACGGCGAGAAAATCGTCAAGGTCCAGGAACTGGCGA | | |
| | | | TCAAGACCGGCCGTCCGCTCATCGGCATCAACGACGGT | | |
| | | | GCTGGCGCGCGCATCCAGGAAGGTGTCGTCTCGCTGGG | | |
| | | | CCTGTACAGCCGTATCTTTCGCAACAACATCCTGGCCT | | |
| | | | CCGGCGTCATCCCGCAAATCTCGTTGATCATGGGAGCC | | |
| | | | GCCGCCGGTGGGCACGTCTACTCCCCCGCCCTGACCGA | | |
| | | | CTTCGTGATCATGGTCGATCAGACCAGCCAGATGTTCA | | |
| | | | TCACCGGGCCCGACGTCATCAAGACCGTCACCGGCGAG | | |
| | | | GAAGTCACCATGGAAGAACTCGGCGGCGCCCACACCCA | | |
| | | | CATGGCCAAGTCGGGTACGGCACACTACGCCGCATCGG | | |
| | | | GCGAACAGGACGCCTTCGACTACGTTCGCGAGCTGCTG | | |
| | | | AGCTACCTGCCGCCCAACAACTCCACCGACGCGCCCCG | | |
| | | | ATACCAAGCCGCAGCCCCGACAGGGCCCATCGAGGAGA | | |
| | | | ACCTCACCGACGAGGACCTCGAATTGGATACGCTGATC | | |
| | | | CCGGACTCGCCCAACCAGCCCTATGACATGCACGAGGT | | |
| | | | GATCACCCGGCTCCTCGACGACGAATTCCTGGAGATAC | | |
| | | | AGGCCGGTTACGCCCAAAACATCGTGGTGGGGTTCGGG | | |
| | | | CGCATCGACGGCCGGCCAGTCGGCATTGTCGCCAACCA | | |
| | | | GCCGACACACTTCGCCGGCTGCCTGGATATCAACGCCT | | |
| | | | CGGAGAAAGCGGCCCGGTTTGTGCGGACCTGCGACTGC | | |
| | | | TTCAATATCCCCATCGTCATGCTGGTGGACGTCCCGGG | | |
| | | | CTTCCTGCCGGGCACCGACCAGGAATACAACGGCATCA | | |
| | | | TCCGGCGCGGCGCCAAGCTGCTCTACGCCTACGGCGAG | | |
| | | | GCCACCGTGCCAAAGATCACGGTCATCACCCGCAAGGC | | |
| | | | CTACGGCGGTGCGTACTGCGTTATGGGCTCCAAAGACA | | |
| | | | TGGGCTGCGACGTCAACCTGGCGTGGCCGACCGCGCAG | | |
| | | | ATCGCGGTGATGGGCGCCTCCGGCGCAGTGGGCTTCGT | | |
| | | | GTACCGCCAGCAGCTGGCCGAGGCCGCCGCCAACGGCG | | |
| | | | AGGACATCGACAAGCTGCGGCTGCGGCTCCAGCAGGAG | | |
| | | | TACGAGGACACACTGGTCAACCCGTACGTGGCCGCCGA | | |
| | | | ACGCGGATACGTCGACGCGGTGATCCCGCCGTCGCATA | | |
| | | | CTCGCGGCTACATCGGGACCGCGCTGCGGCTGCTGGAA | | |
| | | | CGCAAGATCGCGCAGCTGCCGCCCAAAAAGCATGGGAA | | |
| | | | CGTGCCCCTGTGA | | |
| dtsR1 | Mycobacterium | U00012.1 | ATGACAAGCGTTACCGACCACTCGGCTCATTCAATGGA | 140 | |
| | leprae (use this | | ACGCGCTGCCGAGCACACGATCAATATCCACACCACGG | | |
| | to clone M. | | CAGGCAAGCTGGCCGAGCTGCATAAGCGGACCGAAGAA | | |
| | smegmatis | | GCGCTGCATCCGGTCGGTGCAGCTGCCTTCGAGAAGGT | | |
| | gene) | | ACACGCTAAGGGTAAGTTTACCGCCCGCGAGCGCATCT | | |
| | | | ACGCCCTATTGGACGACGACTCATTCGTCGAACTCGAC | | |
| | | | GCACTGGCCAGACACCGCAGCACCAACTTCGGCCTCGG | | |
| | | | TGAAAACCGCCCGGTAGGCGATGGCGTGGTCACCGGCT | | |
| | | | ACGGCACCATCGACGGCCGCGACGTATGCATCTTCAGC | | |
| | | | CAGGACGTCACGGTGTTCGGCGGCAGCCTGGGCGAAGT | | |
| | | | GTATGGCGAGAAGATCGTCAAGGTCCAGGAACTGGCGA | | |
| | | | TCAAGACCGGCCGTCCGCTTATCGGCATCAACGACGGC | | |
| | | | GCGGGCGCGCGTATCCAAGAAGGCGTCGTCTCGCTCGG | | |
| | | | CCTGTACAGCCGGATTTTCCGCAACAATATCTTGGCCT | | |
| | | | CCGGCGTCATCCCGCAGATCTCGCTGATCATGGGAGCG | | |
| | | | GCCGCCGGTGGACACGTGTATTCCCCAGCACTGACCGA | | |
| | | | CTTCGTGGTTATGGTCGACCAAACCAGCCAGATGTTCA | | |
| | | | TCACCGGACCCGACGTCATCAAGACCGTCACCGGCGAG | | |
| | | | GACGTCACCATGGAGGAGCTGGGTGGCGCCCATACCCA | | |
| | | | CATGGCCAAGTCGGGTACCGCACACTATGTAGCATCGG | | |
| | | | GCGAGCAAGACGCCTTCGATTGGGTGCGCGATGTGTTG | | |
| | | | AGCTACCTGCCGTCAAACAACTTCACCGACGCGCCGCG | | |
| | | | GTATTCTAAGCCCGTTCCTCACGGCTCCATTGAAGACA | | |
| | | | ACCTGACCGCTAAAGACTTGGAGTTGGACACGCTTATC | | |
| | | | CCGGACTCGCCGAACCAACCGTACGACATGCACGAAGT | | |
| | | | GGTGACCCGCCTCCTCGACGAGGAAGAGTTCCTTGAGG | | |
| | | | TGCAAGCCGGTTACGCCACCAACATCGTCGTCGGGCTC | | |
| | | | GGACGCATAGATGACCGACCGGTGGGCATCGTTGCCAA | | |
| | | | CCAACCCATCCAGTTCGCCGGCTGTCTAGACATCAACG | | |
| | | | CCTCGGAAAAGGCAGCCCGATTTGTGCGGGTCTGCGAC | | |
| | | | TGCTTCAACATCCCGATCGTGATGTTGGTGGATGTTCC | | |
| | | | AGGCTTCCTGCCTGGCACCGAGCAAGAATATGATGGCA | | |
| | | | TCATCCGACGCGGCGCAAAGCTGCTCTTCGCCTACGGC | | |
| | | | GAAGCCACCGTACCCAAGATCACCGTCATCACCCGCAA | | |
| | | | GGCCTACGGTGGCGCTTACTGCGTGATGGGCTCCAAAA | | |
| | | | ATATGGGCTGCGACGTCAACCTGGCTTGGCCGACCGCA | | |
| | | | CAGATTGCGGTGATGGGTGCCTCCGGCGCAGTAGGCTT | | |
| | | | CGTGTACCGCAAGGAACTGGCCCAAGCGGCCAAGAACG | | |
| | | | GCGCCAATGTTGATGAGCTACGCCTGCAGCTGCAGCAA | | |
| | | | GAGTACGAGGACACCCTGGTGAACCCGTACATCGCCGC | | |
| | | | CGAACGAGGTTACGTCGATGCGGTGATCCCGCCGTCAC | | |
| | | | ACACTCGCGGCTACATTGCCACGGCGCTTCACCTGTTG | | |
| | | | GAGCGCAAGATCGCACACCTTCCCCCCAAGAAGCACGG | | |
| | | | GAACATTCCGCTGTGA | | |
| dtsR1 | Corynebacterium | NC_003450 | ATGACCATTTCCTCACCTTTGATTGACGTCGCCAACCT | 259 | |
| | glutamicum | | TCCAGACATCAACACCACTGCCGGCAAGATCGCCGACC | | |
| | | | TTAAGGCTCGCCGCGCGGAAGCCCATTTCCCCATGGGT | | |
| | | | GAAAAGGCAGTAGAGAAGGTCCACGCTGCTGGACGCCT | | |
| | | | CACTGCCCGTGAGCGCTTGGATTACTTACTCGATGAGG | | |
| | | | GCTCCTTCATCGAGACCGATCAGCTGGCTCGCCACCGC | | |
| | | | ACCACCGCTTTCGGCCTGGGCGCTAAGCGTCCTGCAAC | | |
| | | | CGACGGCATCGTGACCGGCTGGGGCACCATTGATGGAC | | |
| | | | GCGAAGTCTGCATCTTCTCGCAGGACGGCACCGTATTC | | |
| | | | GGTGGCGCGCTTGGTGAGGTGTACGGCGAAAAGATGAT | | |
| | | | CAAGATCATGGAGCTGGCAATCGACACCGGCCGCCCAT | | |
| | | | TGATCGGTCTTTACGAAGGCGCTGGCGCTCGTATTCAG | | |
| | | | GACGGCGCTGTCTCCCTGGACTTCATTTCCCAGACCTT | | |
| | | | CTACCAAAACATTCAGGCTTCTGGCGTTATCCCACAGA | | |
| | | | TCTCCGTCATCATGGGCGCATGTGCAGGTGGCAACGCT | | |
| | | | TACGGCCCAGCTCTGACCGACTTCGTGGTCATGGTGGA | | |
| | | | CAAGACCTCCAAGATGTTCGTTACCGGCCCAGACGTGA | | |
| | | | TCAAGACCGTCACCGGCGAGGAAATCACCCAGGAAGAG | | |
| | | | CTTGGCGGAGCAACCACCCACATGGTGACCGCTGGTAA | | |
| | | | CTCCCACTACACCGCTGCGACCGATGAGGAAGCACTGG | | |
| | | | ATTGGGTACAGGACCTGGTGTCCTTCCTCCCATCCAAC | | |
| | | | AATCGCTCCTACGCACCGATGGAAGACTTCGACGAGGA | | |
| | | | AGAAGGCGGCGTTGAAGAAAACATCACCGCTGACGATC | | |
| | | | TGAAGCTCGACGAGATCATCCCAGATTCCGCGACCGTT | | |
| | | | CCTTACGACGTCCGCGATGTCATCGAATGCCTCACCGA | | |
| | | | CGATGGCGAATACCTGGAAATCCAGGCAGACCGCGCAG | | |
| | | | AAAACGTTGTTATTGCATTCGGCCGCATCGAAGGCCAG | | |
| | | | TCCGTTGGCTTTGTTGCCAACCAGCCAACCCAGTTCGC | | |
| | | | TGGCTGCCTGGACATCGACTCCTCTGAGAAGGCAGCTC | | |
| | | | GCTTCGTCCGCACCTGCGACGCGTTCAACATCCCAATC | | |
| | | | GTCATGCTTGTCGACGTCCCCGGCTTCCTCCCAGGCGC | | |
| | | | AGGCCAGGAGTACGGTGGCATTCTGCGTCGTGGCGCAA | | |
| | | | AGCTGCTCTACGCATACGGCGAAGCAACCGTTCCAAAG | | |
| | | | ATCACCGTCACCATGCGTAAGGCTTACGGCGGAGCGTA | | |
| | | | CTGCGTGATGGGTTCCAAGGGCTTGGGCTCTGACATCA | | |
| | | | ACCTTGCATGGCCAACCGCACAGATCGCCGTCATGGGC | | |
| | | | GCTGCTGGCGCAGTTGGATTCATCTACCGCAAGGAGCT | | |
| | | | CATGGCAGCTGATGCCAAGGGCCTCGATACCGTAGCTC | | |
| | | | TGGCTAAGTCCTTCGAGCGCGAGTATGAAGACCACATG | | |
| | | | CTCAACCCGTACCACGCTGCAGAACGTGGCCTGATCGA | | |
| | | | CGCCGTGATCCTGCCAAGCGAAACCCGCGGACAGATTT | | |
| | | | CCCGCAACCTTCGCCTGCTCAAGCACAAGAACGTCACT | | |
| | | | CGCCCTGCTCGCAAGCACGGCAACATGCCACTG | | |
| metH | Thermobifida | NZ_AAAQ010 | ATGAGCGCTCGACTCTCCTTCCGTGAAGTCCTCGGTTC | 141 | |
| | fusca | 00042.1 | CCGCGTCCTCGTCGCCGACGGGGCGATGGGAACGATGC | | |
| | | | TTCAGACATACGACCTGAGCATGGACGACTTCGAGGGA | | |
| | | | CACGAGGGGTGTAACGAGGTCCTCAACATCACCCGGCC | | |
| | | | CGACGTGGTCCGGGAGATCCACGAGGCCTACCTGCAGG | | |
| | | | CCGGCGTCGACTGTGTCGAAACCAACACGTTCGGCGCG | | |
| | | | AACTTCGGAAACCTCGGCGAATACGGCATCGCGGAACG | | |
| | | | CACCTACGAACTGGCTGAAGCCGGTGCCCGCCTGGCCC | | |
| | | | GCGAAGCCGCCGACGCGTACACCACTGCCGATCACGTC | | |
| | | | CGCTACGTCCTCGGCTCTGTGGGGCCCGGGACGAAGCT | | |
| | | | GCCCACCCTTGGCCACGCCCCGTACGCTGTGCTGCGCG | | |
| | | | ACCACTACGAACAGTGCGCACGCGGGCTCATTGACGGC | | |
| | | | GGTGTCGACGCGATCGTGATCGAAACCTGCCAGGACTT | | |
| | | | GCTGCAGGCGAAAGCCGCGATCGTGGGGGCACGGCGGG | | |
| | | | CCCGCAAGGCCGCGGGTACCGACACGCCGATCATCGTC | | |
| | | | CAGGTGACGATTGAAACCACGGGGACCATGCTGGTGGG | | |
| | | | CTCCGAGATCGGTGCGGCACTGACCTCGCTGGAACCGC | | |
| | | | CAGGGGTCGACATGATCGGCCTCAACTGCGCTACCGGT | | |
| | | | CCAGCAGAGATGAGCGAGCACCTGCGCTACCTCTCCCA | | |
| | | | CCACTCCCGCATCCCCCTCTCCTGCATGCCGAACGCGG | | |
| | | | GCCTGCCTGAGCTGGGGGCGGACGGGGCCGTCTACCCG | | |
| | | | CTGCAGCCGCATGAGCTCACCGAAGCACACGACACGTT | | |
| | | | CATCCGCGAGTTTGGCCTGGCCCTGGTGGGCGGCTGCT | | |
| | | | GCGGCACCACCCCTGAGCACCTCGCCCAAGTGGTGGAG | | |
| | | | CGGGTGCAGGGACGCGGCGTGCCGGACCGCAAACCGCA | | |
| | | | CGTCGAACCCGCCGCCGCCTCTATCTACCAGAGCGTCC | | |
| | | | CGTTCCGCCAGGACACCAGCTACCTGGCGATCGGGGAA | | |
| | | | CGCACCAACGCCAACGGCTCCAAGGCGTTCCGCGAAGC | | |
| | | | CATGCTCGCGGAACGCTACGACGACTGTGTGGAGATCG | | |
| | | | CCCGCCAGCAGATCCGCGACGGCGCGCACATGCTCGAC | | |
| | | | CTGTGCGTCGACTATGTGGGACGCGACGGGGTGCGCGA | | |
| | | | TATGCGGGAGCTGGCTTCCCGGCTGGCCACCGCCTCCA | | |
| | | | CGCTGCCGCTCGTACTGGACTCCACCGAAGTAGCGGTA | | |
| | | | CTGGAAGCTGGACTGGAGATGCTGGGCGGGCGCGCCGT | | |
| | | | GCTCAACTCGGTCAACTACGAGGACGGCGACGGCCCTG | | |
| | | | ACTCCCGGTTCGCCAAGGTCGCCGCGCTGGCGGTGGAG | | |
| | | | CACGGGGCGGCCCTCATGGCGCTGACCATCGACGAGCA | | |
| | | | GGGGCAGGCGCGGACCGCGGAACGGAAAGTGGAGGTCG | | |
| | | | CCGAGCGGCTCATCCGGCAGCTCACCACCGAGTACGGC | | |
| | | | ATCCGCAAGCACGACATCATCGTGGACTGCCTGACCTT | | |
| | | | CACGATCGCAACCGGACAGGAGGAGTCGCGGCGCGACG | | |
| | | | CTCTGGAAACCATCGAGGCGATCCGTGAACTGAAGCGG | | |
| | | | CGCCACCCGGACGTGCAGACCACGCTGGGCGTGTCCAA | | |
| | | | CGTCTCCTTCGGGCTCAACCCGGCTGCCCGCATTGTGC | | |
| | | | TCAACTCGGTGTTCCTCCACGAGTGCGTCCAGGCCGGC | | |
| | | | TTGGACTCCGCGATCGTGCACGCCTCCAAGATCCTGCC | | |
| | | | GATCAACCGCATCCCCGAGGAGCAGCGGCAGGTGGCGT | | |
| | | | TGGACATGATCTACGACCGCCGCACCGATGACTACGAC | | |
| | | | CCGCTGCAACGCTTCCTGCAGCTTTTCGAAGGAGTGGA | | |
| | | | CGCGCAGGCGATGCGCGCCTCGCGCGAGGAAGAGCTGG | | |
| | | | CCGCGCTGCCGCTGTGGGAGCGCCTGGAGCGCCGTATC | | |
| | | | GTCGACGGGGAAGCCGCCGGCATGGAAGCGGACCTGGA | | |
| | | | CGAAGCGCTCACCCAGCGGTCCGCGCTGGACATCATCA | | |
| | | | ACACCACGCTGCTGGCGGGGATGAAGACCGTCGGCGAC | | |
| | | | CTGTTCGGCTCCGGGCAGATGCAGCTCCCGTTCGTGCT | | |
| | | | GAAGTCGGCCGAGGTGATGAAGGCCGCCGTGGCCTATC | | |
| | | | TGGAGCCGCACATGGAGAAGGTGGACGGCGACCTCGGC | | |
| | | | AAGGGGCGGATCGTGCTGGCCACGGTCAAGGGCGACGT | | |
| | | | CCACGACATCGGCAAGAACCTTGTGGACATCATCCTGT | | |
| | | | CCAACAACGGCTACGAGGTCATCAACCTGGGGATCAAG | | |
| | | | CAGCCCATCTCCGCGATTCTGGAGGCGGCCGAGCGGCA | | |
| | | | CCGCGCCGACGTGATCGGCATGTCCGGCCTGCTGGTGA | | |
| | | | AGTCCACGGTGGTGATGCGGGAGAACCTGGAGGAGATG | | |
| | | | AACGCCCGCGGGGTCGCTGACCGCTACCCGGTCCTGCT | | |
| | | | GGGCGGTGCCGCGTTGACCCGCTCCTATGTGGAACAGG | | |
| | | | ACCTCGCCGAGATTTTCAAAGGCGAGGTGCGCTATGCC | | |
| | | | CGCGACGCTTTTGAAGGCTTGAAGCTCATGGACGCCAT | | |
| | | | CATGGCGGTCAAACGCGGGGTGAAGGGGGCTAAGCTGC | | |
| | | | CGCCGCTGCGCACCCGCCGGGTGAAGCGGGGCGCACAG | | |
| | | | CTTACCGTCACCGAGCCGGAGAAGATGCCGACGCGCAG | | |
| | | | CGACGTGGCCACCGACAACCCGGTGCCGACCCCGCCGT | | |
| | | | TCTGGGGGGACCGCATCTGCAAGGGGATTCCGCTCGCC | | |
| | | | GACTACGCGGCTTTCCTGGATGAGCGCGCCACGTTCAT | | |
| | | | GGGCCAGTGGGGGCTGCGCGGCTCCCGCGGCGACGGCC | | |
| | | | CCACCTACGAGGAGCTGGTGGAGACGGAGGGGCGGCCG | | |
| | | | CGGCTGCGCATGTGGCTGGACCGGATCCAGACCGAGGG | | |
| | | | GTGGCTGGAGCCGGCGGTCGTCTACGGCTACTACCGCT | | |
| | | | GCTACAGCGAAGGCAACGACCTGGTCGTCCTCGGTGAG | | |
| | | | GACGAAAACGAGCTGACCCGGTTCACGTTCCCGCGGCA | | |
| | | | GCGCCGCGACCGGCACCTGTGCCTGGCTGACTTCTTCC | | |
| | | | GCCCCAAGGAGTCCGGGGAACTGGACACGGTGGCGTTC | | |
| | | | CAGGTCGTCACCGTCGGTTCGACGATCAGCAAGGCGAC | | |
| | | | CGCGGAGCTGTTCGAGAAGAACGCGTACCGGGACTACT | | |
| | | | TGGAGCTCCACGGGCTGTCCGTGCAGTTGACGGAGGCA | | |
| | | | CTCGCGGAGTACTGGCACACCCGGGTCCGCGCCGAGCT | | |
| | | | GGGCTTCGCCGGGGAGGATCCCGACCCGGCCGATTTGG | | |
| | | | ACGCCTACTTTAAGCTCGGCTATCGAGGCGCCCGTTTC | | |
| | | | TCCCTGGGGTACGGGGCCTGCCCCAACTTGGAGGACCG | | |
| | | | CGCCAAGATCGTGGCCCTGCTGCGTCCGGAACGGGTTG | | |
| | | | GGGTGACGTTGTCCGAGGAGTTCCAGCTTGTTCCCGAA | | |
| | | | CAGTCCACTGACGCGATCGTTGTCCATCACCCCGAGGC | | |
| | | | GAAATACTTCAACGTATGA | | |
| metH | Streptomyces | AL939109.1 | ATGGCCTCGTCGCCATCCACCCCGCCCGCCGACACCCG | 142 | |
| | coelicolor | | CACCCGCGTGTCCGCCCTCCGAGAGGCCCTCGCCACCC | | |
| | | | GCGTGGTGGTCGCCGACGGCGCCATGGGCACCATGCTC | | |
| | | | CAGGCCCAGAACCCCACGCTGGACGACTTCCAGCAGCT | | |
| | | | CGAAGGGTGCAACGAGGTCCTGAACCTCACCCGGCCCG | | |
| | | | ACATCGTCCGCTCGGTGCACGAGGAGTACTTCGCGGCC | | |
| | | | GGCGTCGACTGCGTCGAGACCAACACCTTCGGCGCCAA | | |
| | | | CCACTCCGCCCTGGGCGAGTACGACATCCCCGAGCGCG | | |
| | | | TCCACGAACTGTCCGAGGCCGGCGCCCGCGTCGCCCGC | | |
| | | | GAGGTCGCCGACGAGTTCGGCGCCCGCGACGGCCGGCA | | |
| | | | GCGCTGGGTGCTGGGCTCCATGGGCCCCGGCACCAAGC | | |
| | | | TCCCCACCCTCGGCCACGCCCCGTACACCGTCCTGCGC | | |
| | | | GACGCCTACCAGCGCAACGCCGAGGGACTGGTCGCGGG | | |
| | | | CGGCGCGGACGCACTGCTGGTGGAGACCACGCAGGACC | | |
| | | | TGCTCCAGACCAAGGCCTCGGTGCTCGGCGCCCGGCGC | | |
| | | | GCCCTGGACGTCCTCGGCCTCGACCTGCCGCTCATCGT | | |
| | | | GTCCGTCACCGTCGAGACCACCGGCACCATGCTGCTCG | | |
| | | | GCTCGGAGATCGGCGCCGCGCTCACCGCGCTGGAACCG | | |
| | | | CTCGGCATCGACATGATCGGCCTGAACTGCGCCACCGG | | |
| | | | CCCCGCCGAGATGAGCGAGCACCTGCGCTACCTCGCCC | | |
| | | | GGCACTCCCGCATCCCGCTGACCTGCATGCCCAACGCC | | |
| | | | GGTCTGCCCGTCCTCGGCAAGGACGGCGCCCACTACCC | | |
| | | | GCTGACCGCGCCCGAGCTGGCCGACGCACACGAGACCT | | |
| | | | TCGTGCGCGAGTACGGCCTGTCCCTGGTCGGCGGCTGC | | |
| | | | TGCGGCACCACGCCCGAGCACCTGCGCCAGGTCGTCGA | | |
| | | | GCGGGTCCGGGACACCGCCCCCACCGCACGCGACCCGC | | |
| | | | GCCCCGAGCCCGGCGCCGCCTCGCTCTACCAGACCGTG | | |
| | | | CCCTTCCGCCAGGACACCTCCTACCTGGCCATCGGCGA | | |
| | | | GCGCACCAACGCCAACGGGTCCAAGAAGTTCCGCGAGG | | |
| | | | CCATGCTGGACGGCCGCTGGGACGACTGCGTCGAGATG | | |
| | | | GCCCGCGACCAGATCCGCGAAGGCGCGCACATGCTCGA | | |
| | | | CCTCTGCGTCGACTACGTCGGCCGGGACGGCGTCGCCG | | |
| | | | ACATGGAGGAACTGGCCGGCCGGTTCGCCACCGCCTCC | | |
| | | | ACGCTGCCGATCGTCCTCGACTCCACCGAGGTCGACGT | | |
| | | | CATCCGGGCCGGCCTGGAGAAGCTCGGCGGCCGCGCGG | | |
| | | | TGATCAACTCGGTCAACTACGAGGACGGCGCCGGCCCC | | |
| | | | GAGTCCCGGTTCGCCCGCGTCACGAAGCTCGCCCGGGA | | |
| | | | GCACGGCGCCGCGCTGATCGCGCTGACCATCGACGAGG | | |
| | | | TGGGACAGGCCCGCACCGCCGAGAAGAAGGTCGAGATC | | |
| | | | GCCGAACGGCTCATCGACGACCTCACCGGCAACTGGGG | | |
| | | | CATCCACGAGTCCGACATCCTCGTCGACTGCCTGACCT | | |
| | | | TCACCATCTGCACCGGCCAGGAGGAGTCCCGCAAGGAC | | |
| | | | GGCCTGGCCACCATCGAGGGCATCCGGGAACTCAAGCG | | |
| | | | GCGCCACCCGGACGTGCAGACCACGCTCGGCCTGTCGA | | |
| | | | ACATCTCCTTCGGCCTCAACCCGGCCGCCCGCATCCTG | | |
| | | | CTCAACTCCGTCTTCCTCGACGAATGCGTCAAGGCCGG | | |
| | | | CCTGGACTCGGCCATCGTGCACGCGAGCAAGATCCTGC | | |
| | | | CGATCGCCCGCTTCGACGAGGAGCAGGTCACCACCGCC | | |
| | | | CTCGACTTGATCTACGACCGCCGCCGCGAGGGCTACGA | | |
| | | | CCCCCTGCAAAAGCTCATGCAGCTCTTCGAGGGCGCCA | | |
| | | | CCGCCAAGTCGCTGAAGGCCTCCAAGGCCGAGGAACTG | | |
| | | | GCCGCCCTCCCGCTGGAGGAGCGCCTCAAGCGCCGCAT | | |
| | | | CATCGACGGCGAGAAGAACGGCCTCGAACAGGACCTCG | | |
| | | | ACGAGGCCCTCCGGGAGCGCCCGGCCCTCGAGATCGTC | | |
| | | | AACGACACCCTGCTCGACGGTATGAAGGTCGTCGGCGA | | |
| | | | GCTGTTCGGCTCCGGCCAGATGCAGCTGCCGTTCGTGC | | |
| | | | TCCAGTCCGCCGAGGTCATGAAGACCGCGGTGGCCCAC | | |
| | | | CTGGAGCCGCACATGGAGAAGACCGACGACGACGGCAA | | |
| | | | GGGCACGATCGTGCTGGCCACCGTCCGCGGCGACGTCC | | |
| | | | ACGACATCGGCAAGAACCTCGTCGACATCATCCTGTCC | | |
| | | | AACAACGGCTACAACGTCGTCAACCTCGGCATCAAGCA | | |
| | | | GCCCGTCTCCGCGATCCTGGAAGCGGCCGACGAGCACC | | |
| | | | GGGCCGACGTCATCGGCATGTCCGGCCTCCTCGTCAAG | | |
| | | | TCCACGGTGATCATGAAGGAGAACCTGGAGGAGCTGAA | | |
| | | | CCAGCGCAAGCTGGCCGCCGACTACCCGGTCATCCTCG | | |
| | | | GCGGCGCCGCCCTCACCAGGGCCTACGTCGAACAGGAC | | |
| | | | CTGCACGAGATCTACGACGGCGAGGTCCGCTACGCCCG | | |
| | | | CGACGCCTTCGAGGGCCTGCGCCTCATGGACGCCCTCA | | |
| | | | TCGGCATCAAGCGCGGCGTGCCCGGCGCCAAGCTGCCG | | |
| | | | GAGCTGAAGCAGCGCCGGGTGCGGGCCGCCACCGTCGA | | |
| | | | GATCGACGAGCGCCCCGAGGAAGGCCACGTCCGCTCCG | | |
| | | | ACGTCGCCACCGACPACCCGGTCCCGACCCCGCCCTTC | | |
| | | | CGCGGCACCCGCGTCGTCAAGGGCATCCAGCTCAAGGA | | |
| | | | GTACGCCTCCTGGCTCGACGAGGGCGCCCTCTTCAAGG | | |
| | | | GCCAGTGGGGCCTCAAGCAGGCCCGCACCGGCGAGGGA | | |
| | | | CCCTCCTACGAGGAACTGGTCGAGTCCGAGGGCCGGCC | | |
| | | | GCGGCTGCGCGGCCTGCTCGACCGGCTCCAGACGGACA | | |
| | | | ACCTTTTGGAGGCGGCCGTGGTCTACGGCTACTTCCCC | | |
| | | | TGCGTCTCCAAGGACGACGACCTGATCGTCCTCGACGA | | |
| | | | CGACGGCAACGAACGCACCCGCTTCACCTTCCCCCGCC | | |
| | | | AGCGCCGCGGCCGGCGCCTGTGCCTGGCCGACTTCTTC | | |
| | | | CGCCCGGAGGAGTCCGGCGAGACCGACGTGGTCGGCTT | | |
| | | | CCAGGTCGTCACCGTCGGCTCCCGCATCGGCGAGGAGA | | |
| | | | CGGCCCGCATGTTCGAGGCCAACGCCTACCGCGACTAT | | |
| | | | CTCGAGCTGCACGGCCTGTCCGTGCAGCTCGCCGAGGC | | |
| | | | CCTCGCCGAGTACTGGCACGCGCGCGTGCGCTCGGAAC | | |
| | | | TCGGCTTCGCCGGGGAGGACCCGGCCGAGATGGAGGAC | | |
| | | | ATGTTCGCCCTGAAGTACCGGGGTGCCCGCTTCTCCCT | | |
| | | | CGGCTACGGCGCCTGCCCCGACCTGGAGGACCGCGCCA | | |
| | | | AGATCGCCGCCCTGCTGGAGCCCGAGCGCATCGGCGTC | | |
| | | | CACCTATCCGAGGAGTTCCAGCTCCACCCCGAGCAGTC | | |
| | | | CACCGACGCCATCGTCATCCACCACCCGGAGGCCAAGT | | |
| | | | ACTTCAACGCCCGCTGA | | |
| metH | Mycobacterium | Z97559.1 | GTGACTGCGGCCGACAAGCACCTCTACGACACCGATCT | 143 | |
| | tuberculosis | | GCTCGACGTCTTGTCGCAGCGAGTGATGGTCGGCGACG | | |
| | (use this to | | GTGCAATGGGAACCCAACTACAGGCCGCGGACCTCACG | | |
| | clone M. | | CTCGACGACTTCCGCGGCCTGGAGGGCTGCAACGAGAT | | |
| | smegmatis | | CCTCAACGAAACCCGCCCTGACGTGCTGGAAACCATTC | | |
| | gene) | | ACCGCAACTATTTCGAAGCGGGCGCCGACGCCGTCGAG | | |
| | | | ACGAACACGTTTGGCTGCAACCTGTCCAACCTCGGCGA | | |
| | | | CTACGACATCGCCGACAGGATCCGCGATCTATCACAGA | | |
| | | | AGGGCACCGCGATCGCACGCCGGGTGGCCGACGAGCTG | | |
| | | | GGCAGTCCCGACCGCAAGCGCTACGTGCTGGGGTCGAT | | |
| | | | GGGGCCGGGCACCAAGCTGCCGACTCTGGGCCACACCG | | |
| | | | AATACGCGGTGATCCGCGACGCCTACACCGAGGCCGCG | | |
| | | | CTGGGCATGCTGGACGGCGGAGCCGACGCCATCCTGGT | | |
| | | | GGAAACCTGCCAGGACCTACTGCAGCTGAAGGCGGCGG | | |
| | | | TGTTGGGGTCGCGGCGGGCGATGACGCGGGCCGGGCGG | | |
| | | | CACATTCCGGTGTTTGCCCACGTCACCGTCGAGACCAC | | |
| | | | CGGCACCATGCTGCTGGGCAGCGAGATCGGGGCGGCGT | | |
| | | | TGACCGCTGTCGAGCCGCTCGGTGTGGACATGATCGGC | | |
| | | | TTGAACTGCGCGACGGGTCCGGCCGAGATGAGCGAGCA | | |
| | | | CCTGCGCCACCTGTCCCGGCACGCCCGCATCCCGGTGT | | |
| | | | CGGTGATGCCCAACGCCGGGTTGCCGGTGCTGGGCGCC | | |
| | | | AAGGGCGCCGAATATCCGTTGCTGCCCGACGAATTGGC | | |
| | | | CGAGGCGCTGGCCGGCTTCATCGCCGAGTTCGGGCTCT | | |
| | | | CGCTGGTCGGTGGCTGCTGCGGCACCACCCCGGCCCAT | | |
| | | | ATCCGCGAAGTGGCTGCCGCGGTTGCGAACATCAAGCG | | |
| | | | TCCCGAGCGACAGGTCAGCTACGAGCCGTCGGTGTCGT | | |
| | | | CGCTGTACACCGCAATCCCGTTCGCCCAGGACGCCTCG | | |
| | | | GTTCTGGTGATCGGGGAGCGAACGAACGCCAACGGCTC | | |
| | | | CAAGGGTTTTCGTGAGGCGATGATCGCCGAGGACTACC | | |
| | | | AGAAGTGCCTGGACATCGCCAAGGACCAGACCCGCGAC | | |
| | | | GGCGCCCACCTGCTGGACCTGTGTGTGGACTACGTGGG | | |
| | | | CCGCGACGGTGTGGCCGACATGAAGGCGCTGGCCAGCC | | |
| | | | GGCTGGCCACGTCCTCGACGCTGCCGATCATGCTGGAC | | |
| | | | TCCACCGAAACCGCGGTGCTGCAGGCGGGTTTGGAGCA | | |
| | | | TCTGGGTGGCCGTTGCGCGATCAACTCGGTGAACTACG | | |
| | | | AGGACGGCGACGGCCCGGAATCGCGCTTTGCCAAGACC | | |
| | | | ATGGCGCTGGTCGCCGAGCACGGCGCGGCGGTGGTCGC | | |
| | | | GCTGACCATCGACGAAGAGGGCCAGGCCCGCACCGCGC | | |
| | | | AGAAGAAGGTCGAGATCGCCGAGCGGCTGATCAACGAC | | |
| | | | ATCACCGGCAACTGGGGCGTCGACGAATCATCCATCCT | | |
| | | | CATCGACACCTTGACGTTCACCATCGCCACCGGTCAGG | | |
| | | | AGGAGTCCCGCCGCGACGGCATCGAGACCATCGAGGCG | | |
| | | | ATCCGCGAACTGAAAAAGCGCCACCCGGATGTGCAGAC | | |
| | | | CACACTTGGTCTGTCCAACATCTCGTTTGGTCTCAATC | | |
| | | | CCGCAGCGCGCCAGGTGCTCAACTCGGTGTTCCTGCAC | | |
| | | | GAATGCCAAGAAGCGGGGCTGGATTCGGCGATCGTGCA | | |
| | | | CGCGTCGAAGATCCTGCCGATGAACCGGATTCCCGAGG | | |
| | | | AGCAACGCAACGTCGCCCTGGATCTGGTCTACGACCGC | | |
| | | | CGCCGCGAGGACTACGATCCGCTGCAGGAGCTGATGCG | | |
| | | | GCTGTTCGAAGGCGTGTCGGCGGCCTCCTCGAAAGAGG | | |
| | | | ACCGACTGGCTGAACTAGCTGGGCTGCCGCTGTTCGAA | | |
| | | | CGGCTGGCCCAACGCATCGTCGACGGCGAGCGCAACGG | | |
| | | | CCTGGACGCCGATCTCGACGAGGCGATGACGCAAAAGC | | |
| | | | CGCCGCTTCAGATCATCAACGAACATCTGCTGGCCGGC | | |
| | | | ATGAAGACGGTCGGCGAGCTCTTCGGCTCCGGCCAGAT | | |
| | | | GCAGCTGCCGTTCGTGCTGCAGTCGGCGGAGGTAATGA | | |
| | | | AAGCCGCCGTCGCGTATCTGGAACCGCACATGGAGCGC | | |
| | | | TCGGACGACGATTCGGGCAAGGGACGCATCGTGCTGGC | | |
| | | | CACCGTCAAGGGCGACGTGCACGACATCGGCAAGAACC | | |
| | | | TGGTCGACATCATCTTGAGCAACAACGGCTACGAAGTG | | |
| | | | GTCAACATCGGCATCAAGCAGCCAATCGCCACCATCCT | | |
| | | | CGAAGTCGCCGAGGACAAGAGCGCCGACGTGGTCGGCA | | |
| | | | TGTCGGGCCTGCTGGTGAAGTCGACCGTGGTGATGAAG | | |
| | | | GAAAACCTCGAGGAGATGAACACCCGGGGAGTCGCCGA | | |
| | | | AAAGTTCCCGGTGCTGCTCGGCGGCGCGGCGTTGACGC | | |
| | | | GCAGCTATGTCGAAAACGACCTGGCCGAGATCTACCAG | | |
| | | | GGCGAAGTGCATTACGCGCGAGACGCTTTCGAGGGCCT | | |
| | | | GAAGTTGATGGACACCATCATGAGCGCCAAGCGCGGCG | | |
| | | | AGGCGCCCGACGAAAACAGCCCGGAAGCCATTAAGGCG | | |
| | | | CGTGAGAAAGAAGCCGAACGTAAGGCCCGCCACCAGCG | | |
| | | | ATCCAAACGCATTGCCGCACAGCGCAAAGCCGCCGAAG | | |
| | | | AACCAGTCGAGGTGCCCGAACGCTCCGATGTCGCGGCC | | |
| | | | GACATCGAGGTCCCGGCGCCGCCGTTCTGGGGTTCGCG | | |
| | | | GATCGTCAAGGGCCTGGCGGTGGCCGACTACACCGGTC | | |
| | | | TGCTCGATGAGCGCGCATTGTTTTTGGGCCAGTGGGGT | | |
| | | | TTACGCGGCCAGCGCGGCGGTGAGGGTCCGTCCTACGA | | |
| | | | AGATCTCGTCGAGACCGAGGGCCGGCCGCGGCTGCGGT | | |
| | | | ACTGGTTGGACCGGCTGTCCACCGACGGCATCTTGGCG | | |
| | | | CACGCCGCCGTGGTGTACGGCTATTTCCCGGCGGTGTC | | |
| | | | CGAGGGCAACGACATCGTGGTGCTCACCGAGCCCAAGC | | |
| | | | CCGACGCCCCGGTGCGCTACCGGTTTCACTTCCCGCGC | | |
| | | | CAGCAGCGCGGTCGGTTTTTGTGCATTGCCGATTTCAT | | |
| | | | CCGCTCGCGGGAGCTGGCCGCCGAGCGTGGCGAGGTTG | | |
| | | | ACGTGCTGCCGTTCCAGCTGGTGACCATGGGTCAGCCG | | |
| | | | ATCGCGGATTTCGCCAACGAGCTGTTCGCGTCCAACGC | | |
| | | | CTACCGCGACTACCTGGAGGTGCACGGTATCGGCGTGC | | |
| | | | AGCTCACCGAGGCGCTGGCCGAGTACTGGCACCGGCGG | | |
| | | | ATCCGTGAGGAGCTCAAGTTCTCCGGGGATCGGGCGAT | | |
| | | | GGCGGCCGAGGATCCGGAGGCGAAAGAAGACTATTTCA | | |
| | | | AGCTCGGCTACCGCGGTGCTCGCTTTGCCTTCGGCTAC | | |
| | | | GGCGCATGCCCGGATCTGGAGGACCGCGCCAAGATGAT | | |
| | | | GGCGCTGCTGGAGCCCGAACGCATCGGTGTGACGTTAT | | |
| | | | CCGAGGAATTACAGCTGCATCCCGAACAGTCGACCGAC | | |
| | | | GCGTTCGTCCTGCACCATCCGGAAGCCAAGTACTTCAA | | |
| | | | CGTTTAA | | |
| metH | Mycobacterium | AL583921.1 | ATGCGTGTAACTGCCGCTAACCAACATCAGTACGACAC | 144 | |
| | leprae (use this | | CGATCTCCTCGAGACTTTGGCGCAGCGTGTGATGGTGG | | |
| | to clone M. | | GTGACGGCGCAATGGGTACTCAGCTCCAGGACGCGGAA | | |
| | smegmatis | | CTTACGTTAGATGATTTCCGCGGCCTGGAGGGCTGCAA | | |
| | gene) | | CGAGATTCTCAACGAAACGCGTCCTGACGTGCTGGAAA | | |
| | | | CCATCCACCGACGCTACTTCGAGGCAGGTGCGGACCTC | | |
| | | | GTCGAGACCAACACTTTCGGCTGCAACCTGTCCAACCT | | |
| | | | TGGTGACTACGACATCGCCGACAAGATCAGGGACTTGT | | |
| | | | CGCAGCGGGGCACCGTGATTGCGCGACGGGTCGCCGAC | | |
| | | | GAGCTGACCACCCCCGACCACAAGCGATACGTGCTGGG | | |
| | | | GTCGATGGGACCAGGCACCAAGTTGCCCACCCTGGGCC | | |
| | | | ACACCGAGTACCGGGTCGTTCGAGACGCCTACACCGAG | | |
| | | | TCGGCGTTAGGCATGCTGGACGGTGGCGCTGACGCCGT | | |
| | | | ACTGGTTGAAACCTGTCAGGACTTGCTGCAGCTCAAGG | | |
| | | | CTGCGGTGCTGGGCTCGCGGCGCGCGATGACACAGGCC | | |
| | | | GGTCGGCACATTCCGGTCTTCGTCCACGTGACTGTCGA | | |
| | | | GACGACCGGAACGATGCTGCTGGGAAGTGAGATCGGCG | | |
| | | | CTGCACTGGCTGCCGTCGAGCCGCTCGGTGTCGACATG | | |
| | | | ATCGGTTTGAACTGCGCAACGGGCCCCGCTGAGATGAG | | |
| | | | TGAGCATCTGCGGCACTTGTCCAAGCATGCCCGCATCC | | |
| | | | CGGTGTCGGTGATGCCCAACGCCGGGCTGCCGGTGCTG | | |
| | | | GGTGCCAAGGGAGCTGAATACCCGCTGCAGCCCGACGA | | |
| | | | ATTGGCCGAAGCTTTGGCTGGGTTCATCGCTGAATTTG | | |
| | | | GTCTTTCGTTGGTAGGTGGCTGCTGTGGTACCACCCCG | | |
| | | | GACCACATCCGGGAAGTGGCCGCAGCGGTAGCCAGATG | | |
| | | | CAACGACGGGACAGTGCCACGCGGTGAGCGTCATGTGA | | |
| | | | CCTATGAGCCGTCGGTATCGTCGCTGTATACAGCCATT | | |
| | | | CCATTCGCCCAAAAACCCTCGGTTCTGATGATCGGTGA | | |
| | | | GCGTACGAATGCCAACGGCTCCAAGGTTTTTCGTGAGG | | |
| | | | CAATGATCGCCGAGGACTATCAAAAGTGTCTAGATATC | | |
| | | | GCCAAGGACCAAACCCGTGGCGGCGCACACCTGCTGGA | | |
| | | | TCTGTGTGTCGATTACGTCGGCCGCAACGGTGTGGCCG | | |
| | | | ACATGAAGGCGTTGGCCGGTCGGCTTGCAACGGTGTCG | | |
| | | | ACATTGCCGATCATGCTGGACTCTACCGAAATACCGGT | | |
| | | | GCTGCAGGCAGGTTTGGAGCACCTGGGCGGGCGCTGCG | | |
| | | | TGATCAATTCCGTCAACTACGAGGACGGTGACGGTCCC | | |
| | | | GAGTCACGGTTTGTCAAGACCATGGAGCTGGTCGCCGA | | |
| | | | GCACGGAGCGGCGGTGGTTGCGCTGACCATCGACGAAC | | |
| | | | AGGGTCAGGCCCGCACCGTTGAGAAGAAGGTCGAAGTC | | |
| | | | GCGGAGCGGCTTATCAATGACATTACGAGTAACTGGGG | | |
| | | | CGTTGATAAATCGGCGATTCTCATCGATTGCTTGACTT | | |
| | | | TTACTATTGCCACTGGCCAGGAGGAGTCACGCAAAGAC | | |
| | | | GGCATTGAGACCATCGACGCGATTCGTGAGCTGAAGAA | | |
| | | | GCGGCACCCAGCGGTGCAGACTACGCTGGGGTTGTCCA | | |
| | | | ACATCTCCTTCGGTCTCAATCCTTCTGCACGCCAAGTT | | |
| | | | CTTAACTCTGTTTTTCTACATGAATGTCAGGAAGCAGG | | |
| | | | ACTGGATTCGGCGATTGTGCACGCTTCAAAGATATTGC | | |
| | | | CCATCAACCGGATACCCGAAGAACAGCGCCAGGCTGCG | | |
| | | | CTGGATCTAGTGTATGACCGCCGTCGCGAAGGCTACGA | | |
| | | | CCCATTGCAGAAGCTGATGTGGTTATTCAAAGGTGTGT | | |
| | | | CGTCGCCATCGTCGAAGGAAACACGGGAGGCAGAACTC | | |
| | | | GCTAAGCTGCCGTTGTTCGACCGGTTAGCACAGCGGAT | | |
| | | | CGTCGACGGCGAGCGCAACGGGTTAGATGTTGATCTCG | | |
| | | | ACGAGGCAATGACCCAGAAACCGCCGTTGGCGATCATC | | |
| | | | AACGAGAACCTGCTGGACGGCATGAAGACAGTCGGTGA | | |
| | | | ATTGTTCGGCTCTGGGCAGATGCAGCTGCCTTTCGTGT | | |
| | | | TGCAGTCGGCCGAGGTTATGAAAGCAGCGGTGGCTTAT | | |
| | | | CTAGAACCGCACATGGAGAAATCCGACTGTGACTTCGG | | |
| | | | TAAGGGGTTAGCCAAAGGACGGATTGTGCTGGCTACCG | | |
| | | | TCAAAGGAGATGTGCACGATATTGGCAAAAACCTCGTC | | |
| | | | GATATCATTCTGAGCAACAACGGCTACGAAGTGGTAAA | | |
| | | | CCTCGGCATCAAGCAGCCGATTACCAACATTCTCGAGG | | |
| | | | TGGCCGAGGACAAAAGCGCCGACGTAGTCGGGATGTCG | | |
| | | | GGCTTGCTGGTGAAATCGACTGTGATCATGAAGGAAAA | | |
| | | | CCTCGAGGAGATGAACACTCGCGGAGTCGCTGAGAAAT | | |
| | | | TCCCAGTGCTGCTCGGCGGCGCGGCGTTGACCCGCAGC | | |
| | | | TATGTGGAAAACGACCTGGCCGAAGTCTATGAGGGCGA | | |
| | | | AGTGCATTACGCACGAGACGCTTTCGAGGGTTTGAAGT | | |
| | | | TGATGGACACCATTATGAGCGCCAAGCGCGGCGAGGCG | | |
| | | | CTTGCGCCGGGGAGCCCGGAGTCCTTAGCTGCAGAAGC | | |
| | | | AGACCGCAATAAGGAAACTGAGCGCAAGGCACGTCATG | | |
| | | | AGCGGTCCAAACGCATTGCAGTGCAGCGTAAGGCTGCC | | |
| | | | GAAGAGCCAGTTGAGGTTCCCGAACGCTCCGATGTTCC | | |
| | | | GAGTGATGTCGAGGTTCCGGCGCCGCCGTTCTGGGGTT | | |
| | | | CGCGGATCATCAAGGGTCTGGCGGTGGCCGACTATACC | | |
| | | | GGGTTCCTCGACGAGCGCGCGTTGTTCTTGGGTCAGTG | | |
| | | | GGGATTACGTGGTGTGCGCGGCGGTGCGGGGCCCTCGT | | |
| | | | ACGAGGATTTGGTGCAGACCGAGGGCCGGCCGCGGTTG | | |
| | | | CGCTACTGGCTAGACCGATTGTCCACCTACGGCGTCTT | | |
| | | | GGCGTACGCCGCCGTGGTGTACGGTTACTTCCCGGCGG | | |
| | | | TGTCCGAAGACAACGATATTGTCGTGCTCGCTGAGCCG | | |
| | | | AGACCGGACGCCGAGCAGCGGTACCGGTTCACCTTCCC | | |
| | | | GCGTCAGCAACGCGGTCGGTTCCTGTGCATTGCCGATT | | |
| | | | TTATTCGATCCCGGGATCTGGCGACCGAGCGGAGTGAG | | |
| | | | GTGGATGTTTTGCCGTTCCAGCTGGTGACCATGGGTCA | | |
| | | | ACCCATTGCTGACTTCGTTGGCGAGTTGTTCGTGTCCA | | |
| | | | ATTCCTATCGTGATTATCTTGAAGTGCATGGCATCGGT | | |
| | | | GTGCAGCTAACCGAGGCGCTGGCCGAATACTGGCACCG | | |
| | | | GCGCATTCGTGAAGAGCTGAAATTCTCCGGAAACCGGA | | |
| | | | CGATGTCGGCTGACGATCCCGAGGCCGTCGAGGACTAT | | |
| | | | TTCAAGCTCGGCTACCGAGGTGCCCGCTTCGCGTTCGG | | |
| | | | GTATGGAGCATGCCCGGACCTGGAGGACCGGATCAAGA | | |
| | | | TGATGGAGCTGCTTCAACCCGAACGCATCGGTGTAACG | | |
| | | | ATATCTGAAGAGTTGCAGTTACATCCCGAGCAATCGAC | | |
| | | | TGATGCGTTCGTGCTGCACCATCCGGCGGCTAAGTACT | | |
| | | | TCAACGTCTGA | | |
| metH | Lactobacillus | AL935256 | ATGAAGTTTAAACAAGCACTCCAGCAACGGGTCCTCGT | 145 | |
| | plantarum | | TGCCGATGGCGCAATGGGCACCCTTTTATATGGTAACT | | |
| | | | ATGGCATCAATTCGGCTTTTGAAAACCTGAATTTGACG | | |
| | | | CATCCCGACACGATCTTACGCGTTCACCGATCGTACAT | | |
| | | | TCGGGCTGGTGCCGATATTATTCAAACCAACACCTACG | | |
| | | | CTGCGAACCGCCTAAAGTTGACCCGGTATGATTTACAA | | |
| | | | GACCAAGTCACCACCATCAATCAGGCCGCTGTGAAAAT | | |
| | | | TGCAGCGACCGCACGGGAACACGCGGATCACCCCGTTT | | |
| | | | ACATTCTGGGAACGATCGGTGGACTAGCCGGCGATACC | | |
| | | | GATGCAACTGTTCAACGGGCGACACCAGCAACGATTGC | | |
| | | | TGCCAGCGTGACTGAACAACTTACCGCCCTTCTAGCCA | | |
| | | | CCAACCAGTTAGATGGCATCTTGCTCGAAACATATTAT | | |
| | | | GATTTGCCAGAACTACTCGCCGCGTTAAAAATCGTGAA | | |
| | | | GGCCCATACTGACTTGCCCGTCATCACGAATGTTTCAA | | |
| | | | TGTTAGCCCCCGGCGTCTTACGAAACGGTACGAGCTTC | | |
| | | | ACTGATGCCATCGTCCAACTCAACGCTGCCGGCGCCGA | | |
| | | | CGTAATCGGCACGAACTGTCGCCTGGGACCTTACTATT | | |
| | | | TAGCTCAGTCATTTGAAAACTTGGCGATTCCAGCTAAC | | |
| | | | GTTAAACTAGCCGTTTACCCAAACGCTGGCTTGCCTGG | | |
| | | | CACTGATCAGGACGGTGCGGTGGTCTACGATGGTGAAC | | |
| | | | CAAGCTATTTCGAAGAATATGCCGAACGCTTTCGTCAG | | |
| | | | CTCGGTCTGAACATTATTGGTGGTTGTTGTGGGACCAC | | |
| | | | ACCTTTGCATACCAGCGCAACCGTCCGCGGTCTAAGTA | | |
| | | | ATCGCAGCATCGTTGCTCATGACCAGCCGGCTACAAAA | | |
| | | | CCACAGCCACCAACGCTCGTCACGACAAAGAGTCAGCA | | |
| | | | CCGGTTTCTGCAAAAAGTTGCGACCCAAAAAACGGCGT | | |
| | | | TAGTCGAACTCGATCCACCCCGCGATTTTGATACGACT | | |
| | | | AAATTTTTCCGGGGTGCTGAACGATTAAAAGCCGCTGG | | |
| | | | TGTCGATGGCATTACACTGTCTGACAATTCGTTAGCAA | | |
| | | | CGGTCCGGATTGCTAATACGACGATTGCGGCGCAGCTC | | |
| | | | AAGTTGAACTACGGCATCACGCCGATCGTTCACTTGAC | | |
| | | | GACCCGCGACCACAATCTAATCGGCTTACAATCAGAGA | | |
| | | | TCATGGGTCTACACAGCCTGGGTATTGAGGACATCTTA | | |
| | | | GCTATCACTGGCGATCCGGCCAAACTCGGTGATTTTCC | | |
| | | | GGGAGCCACTTCGGTCAGCGATGTGCGCTCCGTTGAAC | | |
| | | | TGATGAAGTTGATCAAGCAATTCAATAGCGGCATCGGA | | |
| | | | CCAACGGGTAAGTCGCTTAAAGAAGCCAGTGACTTTCG | | |
| | | | GGTCGCAGGCGCCTTTAATCCTAACGCTTATCGCACTT | | |
| | | | CCATATCGACCAAGTCAATCAGTCGGAAGTTAAGTTAT | | |
| | | | GGTTGTGACTACATTATCACCCAACCCGTGTATGATCT | | |
| | | | TGCAAACGTTGACGCTTTGGCGGATGCTCTAGCGGCTA | | |
| | | | ATCACGTGAATGTGCCAGTGTTCGTTGGTGTTATGCCA | | |
| | | | CTCGTCTCACGGCGTAATGCTGAATTTCTACACCATGA | | |
| | | | AGTCCATGGCATTCGGATTCCAGAGCCTATCTTGACAC | | |
| | | | GCATGGCAGAAGCCGAACAGACCGGAAACGAACGGGCA | | |
| | | | GTGGGCATTGCTATTGCAAAGGAATTGATTGATGGTAT | | |
| | | | CTGTGCGCGCTTCAACGGCGTTCACATCGTCACACCGT | | |
| | | | TTAACCGCTTTAAAACGGTCATTGAATTAGTCGATTAC | | |
| | | | ATCCAACAGAAAAACTTAATTAAAGTACAATAA | | |
| metH | Coryne- | AX371329 | ATGTCTACTTCAGTTACTTCACCAGCCCACAACAACGC | 260 | |
| | bacterium | | ACATTCCTCCGAATTTTTGGATGCGTTGGCAAACCATG | | |
| | glutamicum | | TGTTGATCGGCGACGGCGCCATGGGCACCCAGCTCCAA | | |
| | | | GGCTTTGACCTGGACGTGGAAAAGGATTTCCTTGATCT | | |
| | | | GGAGGGGTGTAATGAGATTCTCAACGACACCCGCCCTG | | |
| | | | ATGTGTTGAGGCAGATTCACCGCGCCTACTTTGAGGCG | | |
| | | | GGAGCTGACTTGGTTGAGACCAATACTTTTGGTTGCAA | | |
| | | | CCTGCCGAACTTGGCGGATTATGACATCGCTGATCGTT | | |
| | | | GCCGTGAGCTTGCCTACAAGGGCACTGCAGTGGCTAGG | | |
| | | | GAAGTGGCTGATGAGATGGGGCCGGGCCGAAACGGCAT | | |
| | | | GCGGCGTTTCGTGGTTGGTTCCCTGGGACCTGGAACGA | | |
| | | | AGCTTCCATCGCTGGGCCATGCACCGTATGCAGATTTG | | |
| | | | CGTGGGCACTACAAGGAAGCAGCGCTTGGCATCATCGA | | |
| | | | CGGTGGTGGCGATGCCTTTTTGATTGAGACTGCTCAGG | | |
| | | | ACTTGCTTCAGGTCAAGGCTGCGGTTCACGGCGTTCAA | | |
| | | | GATGCCATGGCTGAACTTGATACATTCTTGCCCATTAT | | |
| | | | TTGCCACGTCACCGTAGAGACCACCGGCACCATGCTCA | | |
| | | | TGGGTTCTGAGATCGGTGCCGCGTTGACAGCGCTGCAG | | |
| | | | CCACTGGGTATCGACATGATTGGTCTGAACTGCGCCAC | | |
| | | | CGGCCCAGATGAGATGAGCGAGCACCTGCGTTACCTGT | | |
| | | | CCAAGCACGCCGATATTCCTGTGTCGGTGATGCCTAAC | | |
| | | | GCAGGTCTTCCTGTCCTGGGTAAAAACGGTGCAGAATA | | |
| | | | CCCACTTGAGGCTGAGGATTTGGCGCAGGCGCTGGCTG | | |
| | | | GATTCGTCTCCGAATATGGCCTGTCCATGGTGGGTGGT | | |
| | | | TGTTGTGGCACCACACCTGAGCACATCCGTGCGGTCCG | | |
| | | | CGATGCGGTGGTTGGTGTTCCAGAGCAGGAAACCTCCA | | |
| | | | CACTGACCAAGATCCCTGCAGGCCCTGTTGAGCAGGCC | | |
| | | | TCCCGCGAGGTGGAGAAAGAGGACTCCGTCGCGTCGCT | | |
| | | | GTACACCTCGGTGCCATTGTCCCAGGAAACCGGCATTT | | |
| | | | CCATGATCGGTGAGCGCACCAACTCCAACGGTTCCAAG | | |
| | | | GCATTCCGTGAGGCAATGCTGTCTGGCGATTGGGAAAA | | |
| | | | GTGTGTGGATATTGCCAAGCAGCAAACCCGCGATGGTG | | |
| | | | CACACATGCTGGATCTTTGTGTGGATTACGTGGGACGA | | |
| | | | GACGGCACCGCCGATATGGCGACCTTGGCAGCACTTCT | | |
| | | | TGCTACCAGCTCCACTTTGCCAATCATGATTGACTCCA | | |
| | | | CCGAGCCAGAGGTTATTCGCACAGGCCTTGAGCACTTG | | |
| | | | GGTGGACGAAGCATCGTTAACTCCGTCAACTTTGAAGA | | |
| | | | CGGCGATGGCCCTGAGTCCCGCTACCAGCGCATCATGA | | |
| | | | AACTGGTAAAGCAGCACGGTGCGGCCGTGGTTGCGCTG | | |
| | | | ACCATTGATGAGGAAGGCCAGGCACGTACCGCTGAGCA | | |
| | | | CAAGGTGCGCATTGCTAAACGACTGATTGACGATATCA | | |
| | | | CCGGCAGCTACGGCCTGGATATCAAAGACATCGTTGTG | | |
| | | | GACTGCCTGACCTTCCCGATCTCTACTGGCCAGGAAGA | | |
| | | | AACCAGGCGAGATGGCATTGAAACCATCGAAGCCATCC | | |
| | | | GCGAGCTGAAGAAGCTCTACCCAGAAATCCACACCACC | | |
| | | | CTGGGTCTGTCCAATATTTCCTTCGGCCTGAACCCTGC | | |
| | | | TGCACGCCAGGTTCTTAACTCTGTGTTCCTCAATGAGT | | |
| | | | GCATTGAGGCTGGTCTGGACTCTGCGATTGCGCACAGC | | |
| | | | TCCAAGATTTTGCCGATGAACCGCATTGATGATCGCCA | | |
| | | | GCGCGAAGTGGCGTTGGATATGGTCTATGATCGCCGCA | | |
| | | | CCGAGGATTACGATCCGCTGCAGGAATTCATGCAGCTG | | |
| | | | TTTGAGGGCGTTTCTGCTGCCGATGCCAAGGATGCTCG | | |
| | | | CGCTGAACAGCTGGCCGCTATGCCTTTGTTTGAGCGTT | | |
| | | | TGGCACAGCGCATCATCGACGGCGATAAGAATGGCCTT | | |
| | | | GAGGATGATCTGGAAGCAGGCATGAAGGAGAAGTCTCC | | |
| | | | TATTGCGATCATCAACGAGGACCTTCTCAACGGCATGA | | |
| | | | AGACCGTGGGTGAGCTGTTTGGTTCCGGACAGATGCAG | | |
| | | | CTGCCATTCGTGCTGCAATCGGCAGAAACCATGAAAAC | | |
| | | | TGCGGTGGCCTATTTGGAACCGTTCATGGAAGAGGAAG | | |
| | | | CAGAAGCTACCGGATCTGCGCAGGCAGAGGGCAAGGGC | | |
| | | | AAAATCGTCGTGGCCACCGTCAAGGGTGACGTGCACGA | | |
| | | | TATCGGCAAGAACTTGGTGGACATCATTTTGTCCAACA | | |
| | | | ACGGTTACGACGTGGTGAACTTGGGCATCAAGCAGCCA | | |
| | | | CTGTCCGCCATGTTGGAAGCAGCGGAAGAACACAAAGC | | |
| | | | AGACGTCATCGGCATGTCGGGACTTCTTGTGAAGTCCA | | |
| | | | CCGTGGTGATGAAGGAAAACCTTGAGGAGATGAACAAC | | |
| | | | GCCGGCGCATCCAATTACCCAGTCATTTTGGGTGGCGC | | |
| | | | TGCGCTGACGCGTACCTACGTGGAAAACGATCTCAACG | | |
| | | | AGGTGTACACCGGTGAGGTGTACTACGCCCGTGATGCT | | |
| | | | TTCGAGGGCCTGCGCCTGATGGATGAGGTGATGGCAGA | | |
| | | | AAAGCGTGGTGAAGGACTTGATCCCAACTCACCAGAAG | | |
| | | | CTATTGAGCAGGCGAAGAAGAAGGCGGAACGTAAGGCT | | |
| | | | CGTAATGAGCGTTCCCGCAAGATTGCCGCGGAGCGTAA | | |
| | | | AGCTAATGCGGCTCCCGTGATTGTTCCGGAGCGTTCTG | | |
| | | | ATGTCTCCACCGATACTCCAACCGCGGCACCACCGTTC | | |
| | | | TGGGGAACCCGCATTGTCAAGGGTCTGCCCTTGGCGGA | | |
| | | | GTTCTTGGGCAACCTTGATGAGCGCGCCTTGTTCATGG | | |
| | | | GGCAGTGGGGTCTGAAATCCACCCGCGGCAACGAGGGT | | |
| | | | CCAAGCTATGAGGATTTGGTGGAAACTGAAGGCCGACC | | |
| | | | ACGCCTGCGCTACTGGCTGGATCGCCTGAAGTCTGAGG | | |
| | | | GCATTTTGGACCACGTGGCCTTGGTGTATGGCTACTTC | | |
| | | | CCAGCGGTCGCGGAAGGCGATGACGTGGTGATCTTGGA | | |
| | | | ATCCCCGGATCCACACGCAGCCGAACGCATGCGCTTTA | | |
| | | | GCTTCCCACGCCAGCAGCGCGGCAGGTTCTTGTGCATC | | |
| | | | GCGGATTTCATTCGCCCACGCGAGCAAGCTGTCAAGGA | | |
| | | | CGGCCAAGTGGACGTCATGCCATTCCAGCTGGTCACCA | | |
| | | | TGGGTAATCCTATTGCTGATTTCGCCAACGAGTTGTTC | | |
| | | | GCAGCCAATGAATACCGCGAGTACTTGGAAGTTCACGG | | |
| | | | CATCGGCGTGCAGCTCACCGAAGCATTGGCCGAGTACT | | |
| | | | GGCACTCCCGAGTGCGCAGCGAACTCAAGCTGAACGAC | | |
| | | | GGTGGATCTGTCGCTGATTTTGATCCAGAAGACAAGAC | | |
| | | | CAAGTTCTTCGACCTGGATTACCGCGGCGCCCGCTTCT | | |
| | | | CCTTTGGTTACGGTTCTTGCCCTGATCTGGAAGACCGC | | |
| | | | GCAAAGCTGGTGGAATTGCTCGAGCCAGGCCGTATCGG | | |
| | | | CGTGGAGTTGTCCGAGGAACTCCAGCTGCACCCAGAGC | | |
| | | | AGTCCACAGACGCGTTTGTGCTCTACCACCCAGAGGCA | | |
| | | | AAGTACTTTAACGTCTAA | | |
| metH | Escherichia coli | AE000475 | GTGAGCAGCAAAGTGGAACAACTGCGTGCGCAGTTAAA | 261 | |
| | | | TGAACGTATTCTGGTGCTGGACGGCGGTATGGGCACCA | | |
| | | | TGATCCAGAGTTATCGACTGAACGAAGCCGATTTTCGT | | |
| | | | GGTGAACGCTTTGCCGACTGGCCATGCGACCTCAAAGG | | |
| | | | CAACAACGACCTGCTGGTACTCAGTAAACCGGAAGTGA | | |
| | | | TCGCCGCTATCCACAACGCCTACTTTGAAGCGGGCGCG | | |
| | | | GATATCATCGAAACCAACACCTTCAACTCCACGACCAT | | |
| | | | TGCGATGGCGGATTACCAGATGGAATCCCTGTCGGCGG | | |
| | | | AAATCAACTTTGCGGCGGCGAAACTGGCGCGAGCTTGT | | |
| | | | GCTGACGAGTGGACCGCGCGCACGCCAGAGAAACCGCG | | |
| | | | CTACGTTGCCGGTGTTCTCGGCCCGACCAACCGCACGG | | |
| | | | CGTCTATTTCTCCGGACGTCAACGATCCGGCATTTCGT | | |
| | | | AATATCACTTTTGACGGGCTGGTGGCGGCTTATCGAGA | | |
| | | | GTCCACCAAAGCGCTGGTGGAAGGTGGCGCGGATCTGA | | |
| | | | TCCTGATTGAAACCGTTTTCGACACCCTTAACGCCAAA | | |
| | | | GCGGCGGTATTTGCGGTGAAAACGGAGTTTGAAGCGCT | | |
| | | | GGGCGTTGAGCTGCCGATTATGATCTCCGGCACCATCA | | |
| | | | CCGACGCCTCCGGGCGCACGCTCTCCGGGCAGACCACC | | |
| | | | GAAGCATTTTACAACTCATTGCGCCACGCCGAAGCTCT | | |
| | | | GACCTTTGGCCTGAACTGTGCGCTGGGGCCCGATGAAC | | |
| | | | TGCGCCAGTACGTGCAGGAGCTGTCACGGATTGCGGAA | | |
| | | | TGCTACGTCACCGCGCACCCGAACGCCGGGCTACCCAA | | |
| | | | CGCCTTTGGTGAGTACGATCTCGACGCCGACACGATGG | | |
| | | | CAAAACAGATACGTGAATGGGCGCAAGCGGGTTTTCTC | | |
| | | | AATATCGTCGGCGGCTGCTGTGGCACCACGCCACAACA | | |
| | | | TATTGCAGCGATGAGTCGTGCAGTAGAAGGATTAGCGC | | |
| | | | CGCGCAAACTGCCGGAAATTCCCGTAGCCTGCCGTTTG | | |
| | | | TCCGGCCTGGAGCCGCTGAACATTGGCGAAGATAGCCT | | |
| | | | GTTTGTGAACGTGGGTGAACGCACCAACGTCACCGGTT | | |
| | | | CCGCTAAGTTCAAGCGCCTGATCAAAGAAGAGAAATAC | | |
| | | | AGCGAGGCGCTGGATGTCGCGCGTCAACAGGTGGAAAA | | |
| | | | CGGCGCGCAGATTATCGATATCAACATGGATGAAGGGA | | |
| | | | TGCTCGATGCCGAAGCGGCGATGGTGCGTTTTCTCAAT | | |
| | | | CTGATTGCCGGTGAACCGGATATCGCTCGCGTGCCGAT | | |
| | | | TATGATCGACTCCTCAAAATGGGACGTCATTGAAAAAG | | |
| | | | GTCTGAAGTGTATCCAGGGCAAAGGCATTGTTAACTCT | | |
| | | | ATCTCGATGAAAGAGGGCGTCGATGCCTTTATCCATCA | | |
| | | | CGCGAAATTGTTGCGTCGCTACGGTGCGGCAGTGGTGG | | |
| | | | TAATGGCCTTTGACGAACAGGGACAGGCCGATACTCGC | | |
| | | | GCACGGAAAATCGAGATTTGCCGTCGGGCGTACAAAAT | | |
| | | | CCTCACCGAAGAGGTTGGCTTCCCGCCAGAAGATATCA | | |
| | | | TCTTCGACCCAAACATCTTCGCGGTCGCAACTGGCATT | | |
| | | | GAAGAGCACAACAACTACGCGCAGGACTTTATCGGCGC | | |
| | | | GTGTGAAGACATCAAACGCGAACTGCCGCACGCGCTGA | | |
| | | | TTTCCGGCGGCGTATCTAACGTTTCTTTCTCGTTCCGT | | |
| | | | GGCAACGATCCGGTGCGCGAAGCCATTCACGCAGTGTT | | |
| | | | CCTCTACTACGCTATTCGCAATGGCATGGATATGGGGA | | |
| | | | TCGTCAACGCCGGGCAACTGGCGATTTACGACGACCTA | | |
| | | | CCCGCTGAACTGCGCGACGCGGTGGAAGATGTGATTCT | | |
| | | | TAATCGTCGCGACGATGGCACCGAGCGTTTACTGGAGC | | |
| | | | TTGCCGAGAAATATCGCGGCAGCAAAACCGACGACACC | | |
| | | | GCCAACGCCCAGCAGGCGGAGTGGCGCTCGTGGGAAGT | | |
| | | | GAATAAACGTCTGGAATACTCGCTGGTCAAAGGCATTA | | |
| | | | CCGAGTTTATCGAGCAGGATACCGAAGAAGCCCGCCAG | | |
| | | | CAGGCTACGCGCCCGATTGAAGTGATTGAAGGCCCGTT | | |
| | | | GATGGACGGCATGAATGTGGTCGGCGACCTGTTTGGCG | | |
| | | | AAGGGAAAATGTTCCTGCCACAGGTGGTCAAATCGGCG | | |
| | | | CGCGTCATGAAACAGGCGGTGGCCTACCTCGAACCGTT | | |
| | | | TATTGAAGCCAGCAAAGAGCAGGGCAAAACCAACGGCA | | |
| | | | AGATGGTGATCGCCACCGTGAAGGGCGACGTCCACGAC | | |
| | | | ATCGGTAAAAATATCGTTGGTGTGGTGCTGCAATGTAA | | |
| | | | CAACTACGAAATTGTCGATCTCGGCGTTATGGTGCCTG | | |
| | | | CGGAAAAAATTCTCCGTACCGCTAAAGAAGTGAATGCT | | |
| | | | GATCTGATTGGCCTTTCGGGGCTTATCACGCCGTCGCT | | |
| | | | GGACGAGATGGTTAACGTGGCGAAAGAGATGGAGCGTC | | |
| | | | AGGGCTTCACTATTCCGTTACTGATTGGCGGCGCGACG | | |
| | | | ACCTCAAAAGCGCACACGGCGGTGAAAATCGAGCAGAA | | |
| | | | CTACAGCGGCCCGACGGTGTATGTGCAGAATGCCTCGC | | |
| | | | GTACCGTTGGTGTGGTGGCGGCGCTGCTTTCCGATACC | | |
| | | | CAGCGTGATGATTTTGTCGCTCGTACCCGCAAGGAGTA | | |
| | | | CGAAACCGTACGTATTCAGCACGGGCGCAAGAAACCGC | | |
| | | | GCACACCACCGGTCACGCTGGAAGCGGCGCGCGATAAC | | |
| | | | GATTTCGCTTTTGACTGGCAGGCTTACACGCCGCCGGT | | |
| | | | GGCGCACCGTCTCGGCGTGCAGGAAGTCGAAGCCAGCA | | |
| | | | TCGAAACGCTGCGTAATTACATCGACTGGACACCGTTC | | |
| | | | TTTATGACCTGGTCGCTGGCCGGGAAGTATCCGCGCAT | | |
| | | | TCTGGAAGATGAAGTGGTGGGCGTTGAGGCGCAGCGGC | | |
| | | | TGTTTAAAGACGCCAACGACATGCTGGATAAATTAAGC | | |
| | | | GCCGAGAAAACGCTGAATCCGCGTGGCGTGGTGGGCCT | | |
| | | | GTTCCCGGCAAACCGTGTGGGCGATGACATTGAAATCT | | |
| | | | ACCGTGACGAAACGCGTACCCATGTGATCAACGTCAGC | | |
| | | | CACCATCTGCGTCAACAGACCGAAAAAACAGGCTTCGC | | |
| | | | TAACTACTGTCTCGCTGACTTCGTTGCGCCGAAGCTTT | | |
| | | | CTGGTAAAGCAGATTACATCGGCGCATTTGCCGTGACT | | |
| | | | GGCGGGCTGGAAGAGGACGCACTGGCTGATGCCTTTGA | | |
| | | | AGCGCAGCACGATGATTACAACAAAATCATGGTGAAAG | | |
| | | | CGCTTGCCGACCGTTTAGCCGAAGCCTTTGCGGAGTAT | | |
| | | | CTCCATGAGCGTGTGCGTAAAGTCTACTGGGGCTATGC | | |
| | | | GCCGAACGAGAACCTCAGCAACGAAGAGCTGATCCGCG | | |
| | | | AAAACTACCAGGGCATCCGTCCGGCACCGGGCTATCCG | | |
| | | | GCCTGCCCGGAACATACGGAAAAAGCCACCATCTGGGA | | |
| | | | GCTGCTGGAAGTGGAAAAACACACTGGCATGAAACTCA | | |
| | | | CAGAATCTTTCGCCATGTGGCCCGGTGCATCGGTTTCG | | |
| | | | GGTTGGTACTTCAGCCACCCGGACAGCAAGTACTACGC | | |
| | | | TGTAGCACAAATTCAGCGCGATCAGGTTGAAGATTATG | | |
| | | | CCCGCCGTAAAGGTATGAGCGTTACCGAAGTTGAGCGC | | |
| | | | TGGCTGGCACCGAATCTGGGGTATGACGCGGACTGA | | |
| metE | Mycobacterium | Z95585.1 | GTGACCCAGCCTGTACGTCGTCAACCCTTTACCGCAAC | 146 | |
| | tuberculosis | | CATCACCGGCTCCCCGCGCATCGGCCCGCGCCGCGAAC | | |
| | (use this to | | TCAAGCGCGCCACCGAAGGCTACTGGGCCGGACGTACC | | |
| | clone M. | | AGCCGATCCGAGCTGGAGGCCGTCGCCGCCACGTTACG | | |
| | smegmatis | | CCGCGACACCTGGTCGGCCCTGGCCGCGGCCGGTCTGG | | |
| | gene) | | ACTCGGTGCCGGTGAACACCTTCTCCTACTACGACCAA | | |
| | | | ATGCTCGATACCGCGGTGCTGCTCGGCGCGCTGCCGCC | | |
| | | | CCGAGTGAGCCCGGTTTCCGACGGGCTGGACCGCTATT | | |
| | | | TCGCCGCGGCGCGGGGCACCGACCAGATCGCGCCGCTG | | |
| | | | GAGATGACGAAGTGGTTCGACACCAACTACCACTACCT | | |
| | | | GGTACCCGAGATCGGGCCGTCGACCACGTTCACGCTGC | | |
| | | | ACCCCGGCAAGGTGCTCGCCGAACTCAAAGAGGCGTTA | | |
| | | | GGGCAAGGCATTCCCGCACGTCCGGTGATCATCGGGCC | | |
| | | | GATCACCTTCCTGCTGCTGAGCAAGGCCGTCGACGGCG | | |
| | | | CGGGGGCGCCGATCGAACGCCTCGAAGAGTTGGTTCCG | | |
| | | | GTCTATTCGGAGCTGCTGTCGCTGCTTGCCGACGGCGG | | |
| | | | CGCCCAGTGGGTGCAGTTCGACGAGCCGGCGCTGGTGA | | |
| | | | CCGACCTCTCCCCCGACGCGCCCGCCCTGGCTGAAGCG | | |
| | | | GTGTACACCGCGCTGTGCTCGGTGAGCAACCGGCCTGC | | |
| | | | GATCTATGTCGCCACCTACTTCGGGGACCCGGGCGCGG | | |
| | | | CCCTACCGGCGCTGGCTCGCACCCCGGTCGAAGCCATC | | |
| | | | GGCGTCGACCTGGTGGCCGGTGCCGACACCTCGGTGGC | | |
| | | | CGGGGTACCCGAGCTGGCCGGCAAGACGCTGGTGGCCG | | |
| | | | GGGTCGTCGACGGGCGCAACGTCTGGCGCACCGACCTG | | |
| | | | GAGGCGGCGTTGGGCACGTTGGCGACCCTGCTGGGTTC | | |
| | | | GGCGGCTACCGTGGCCGTCTCGACGTCGTGCTCGACAC | | |
| | | | TGCACGTGCCGTACTCGCTGGAACCGGAAACCGACCTG | | |
| | | | GATGACGCGTTGCGGAGCTGGCTGGCGTTCGGTGCCGA | | |
| | | | AAAGGTGCGCGAAGTCGTCGTTCTCGCGCGTGCCCTGC | | |
| | | | GCGACGGACACGACGCGGTCGCCGACGAGATCGCGTCG | | |
| | | | TCCCGCGCCGCCATCGCGTCCCGCAAGCGCGACCCGCG | | |
| | | | GTTACACAATGGGCAAATCCGGGCGCGCATCGAGGCGA | | |
| | | | TCGTCGCGTCCGGAGCCCACCGCGGCAATGCCGCCCAG | | |
| | | | CGCCGCGCCAGCCAAGACGCGCGACTGCACCTGCCGCC | | |
| | | | GCTGCCGACCACGACGATCGGCTCCTACCCGCAGACCT | | |
| | | | CGGCGATCCGCGTTGCGCGTGCGGCGCTGCGGGCCGGT | | |
| | | | GAGATCGACGAGGCCGAGTACGTGCGCCGGATGCGGCA | | |
| | | | AGAGATCACCGAGGTGATCGCGCTACAGGAGCGGCTCG | | |
| | | | GGCTCGACGTGCTGGTGCACGGCGAACCGGAGCGCAAC | | |
| | | | GACATGGTGCAGTACTTCGCCGAGCAATTGGCGGGTTT | | |
| | | | CTTCGCTACCCAGAACGGCTGGGTGCAGTCCTACGGCA | | |
| | | | GCCGCTGTGTGCGTCCGCCGATCCTGTACGGCGACGTG | | |
| | | | TCCCGGCCGCGGGCGATGACGGTCGAGTGGATCACCTA | | |
| | | | CGCGCAGTCGCTGACCGACAAACCGGTGAAGGGCATGT | | |
| | | | TGACCGGGCCGGTGACGATTCTGGCGTGGTCGTTCGTG | | |
| | | | CGTGACGACCAGCCGTTGGCCGATACCGCCAACCAGGT | | |
| | | | GGCGCTGGCGATTCGCGACGAGACCGTGGATTTGCAGT | | |
| | | | CCGCCGGCATCGCGGTCATCCAGGTCGACGAGCCTGCG | | |
| | | | CTGCGTGAACTGCTGCCGCTGCGTCGCGCCGACCAGGC | | |
| | | | CGAGTACTTGCGTTGGGCGGTAGGGGCTTTCCGGTTGG | | |
| | | | CCACCTCCGGCGTCTCGGACGCCACCCAGATCCACACG | | |
| | | | CATCTGTGCTACTCGGAGTTCGGCGAGGTGATCGGCGC | | |
| | | | GATCGCCGATCTGGACGCGGACGTCACGTCCATCGAGG | | |
| | | | CGGCCCGGTCACACATGGAGGTGCTCGACGACCTGAAC | | |
| | | | GCGATCGGCTTCGCCAACGGTGTGGGCCCGGGCGTCTA | | |
| | | | TGACATTCACTCGCCACGGGTGCCCTCCGCTGAGGAGA | | |
| | | | TGGCCGACTCGTTGCGGGCCGCGTTGCGCGCGGTGCCG | | |
| | | | GCCGAGCGGCTGTGGGTCAACCCCGACTGCGGACTGAA | | |
| | | | GACCCGCAATGTCGACGAGGTGACCGCGTCGCTGCACA | | |
| | | | ACATGGTCGCCGCCGCCCGGGAGGTGCGCGCGGGCTAG | | |
| metE | Mycobacterium | Z94723.1 | ATGGACGAACTCGTGACCACTCAATCATTCACCGCAAC | 147 | |
| | leprae (use this | | CGTAACTGGCTCTCCACGCATTGGCCCGCGCCGCGAAC | | |
| | to clone M. | | TTAAACGGGCGACCGAAGGCTATTGGGCCAAGCGTACC | | |
| | smegmatis | | AGCCGATCAGAACTGGAGTCCGTCGCCTCAACATTGCG | | |
| | gene) | | CCGCGACATGTGGTCGGACTTAGCCGCCGCCGGCCTGG | | |
| | | | ACTCCGTACCGGTGAACACCTTCTCTTACTACGACCAG | | |
| | | | ATGCTCGACACGGCATTCATGCTCGGCGCGCTGCCTGC | | |
| | | | CCGGGTAGCACAAGTGTCCGACGACCTAGATCAGTACT | | |
| | | | TCGCCCTCGCACGCGGCAACAACGACATCAAGCCGCTG | | |
| | | | GAGATGACTAAGTGGTTCGACACCAACTACCACTACCT | | |
| | | | GGTTCCTGAAATCGAGCCCGCGACCACCTTCTCACTGA | | |
| | | | ACCCAGGCAAGATACTCGGTGAGCTGAAAGAAGCACTT | | |
| | | | GAGCAAAGAATTCCGTCCCGACCGGTCATTATCGGTCC | | |
| | | | GGTCACCTTCCTGTTACTGAGCAAGGGCATCAATGGCG | | |
| | | | GGGGCGCACCGATACAGCGGCTCGAGGAGCTGGTGGGA | | |
| | | | ATCTACTGCACGCTGCTATCACTGCTCGCCGAGAATGG | | |
| | | | CGCACGATGGGTACAGTTCGACGAGCCGGCGCTGGTGA | | |
| | | | CTGATCTATCCCCCGATGCACCGGCGTTGGCGGAAGCA | | |
| | | | GTTTACACTGCACTCGGCTCAGTTAGCAAACGACCCGC | | |
| | | | CATTTACGTGGCCACTTACTTCGGTAACCCCGGCGCTT | | |
| | | | CCTTGGCGGGGCTAGCCCGCACGCCCATCGAGGCGATC | | |
| | | | GGTGTCGACTTCGTTTGTGGTGCCGACACGTCGGTCGC | | |
| | | | GGCGGTGCCCGAGCTGGCCGGCAAGACTCTGGTGGCTG | | |
| | | | GCATCGTCGACGGACGCAACATCTGGCGCACTGACCTG | | |
| | | | GAATCGGCGTTGAGCAAGTTGGCTACTCTGCTGGGTTC | | |
| | | | AGCAGCCACCGTTGCTGTTTCGACGTCGTGCTCTACGC | | |
| | | | TGCATGTGCCGTATTCGTTGGAACCAGAAACCGACCTG | | |
| | | | GACGACAATTTGCGCAGCTGGCTGGCGTTCGGTGCGGA | | |
| | | | AAAGGTGGCCGAAGTCGTTGTGCTGGCACGCGCACTTC | | |
| | | | GCGACGGGCGCGACGCGGTCGCCGATGAGATCGCGGCG | | |
| | | | TCCAATGCCGCCGTTGCCTCGCGACGCAGCGACCCGCG | | |
| | | | GCTGCACAACGGGCAGGTACGCGCGCGTATTGACTCGA | | |
| | | | TTGTCGCTTCCGGTACGCACCGCGGTGACGCAGCGCAG | | |
| | | | CGCCGCACCAGCCAGGACGCGCGCCTACACTTACCGCC | | |
| | | | GCTGCCGACCACGACGATCGGCTCCTACCCGCAGACCT | | |
| | | | CAGCGATCCGCAAAGCGCGAGCGGCACTGCAGGACGCT | | |
| | | | GAGATCGACGAGGCCGAGTACATCAGCAGGATGAAAAA | | |
| | | | AGAAGTCGCCGACGCCATCAAACTGCAGGAGCAACTCG | | |
| | | | GGCTAGATGTACTGGTCCATGGCGAGCCGGAGCGCAAC | | |
| | | | GACATGGTACAGTATTTCGCTGAGCAACTGGGCGGCTT | | |
| | | | CTTCGCCACGCAGAACGGTTGGGTGCAGTCCTACGGCA | | |
| | | | GCCGTTGTGTACGTCCGCCGATCCTCTACGGTGACGTG | | |
| | | | TCCCGGCCTCACCCGATGACAATCGAGTGGATCACCTA | | |
| | | | CGCGCAGTCCCTAACTGACAAGCCAGTTAAGGGCATGT | | |
| | | | TGACCGGACCGGTCACGATCTTAGCCTGGTCGTTTGTT | | |
| | | | CGTGACGACCAGCCGCTGGCCGATACCGCGAACCAAGT | | |
| | | | AGCACTGGCGATTCGCGATGAGACCGTAGATCTACAAT | | |
| | | | CCGCCGGTATCGCAATCATCCAGGTTGACGAGCCCGCG | | |
| | | | CTACGTGAGCTGCTGCCGCTGCGTAGGGCTGATCAAGA | | |
| | | | CGAATACTTATGTTGGGCAGTAAAGGCTTTCCGCCTAG | | |
| | | | CTACCTCGGGGGTCGCCGACTCGACGCAAATCCACACT | | |
| | | | CATCTGTGCTACTCCGAGTTCGGCGAAGTGATTGGAGC | | |
| | | | TATCGCCGACCTGGACGCCGACGTCACATCCATCGAAG | | |
| | | | CGGCGCGCTCACACATGGAAGTATTGGATGACCTGAAC | | |
| | | | GCAGTCGGCTTCGCTAACAGCATAGGCCCGGGAGTCTA | | |
| | | | CGACATCCACTCGCCGCGGGTACCAAGCACTGACGAGA | | |
| | | | TTGCCAAGTCGCTACGCGCAGCATTAAAAGCCATACCG | | |
| | | | ATGCAACGGCTTTGGGTTAACCCCGACTGCGGGCTGAA | | |
| | | | GACCCGATCAGTTGACGAGGTGAGCGCGTCGCTGCAGA | | |
| | | | ACATGGTCGCAGCAGCACGCCAGGTGCGGGCAGGGGCC | | |
| | | | TAA | | |
| metE | Streptomyces | AL939107.1 | GTGACAGCGAAGTCCGCAGCCGCGGCAGCACGGGCCAC | 148 | |
| | coelicolor | | CGTGTACGGCTACCCCCGCCAGGGCCCGAACCGGGAAC | | |
| | | | TGAAGAAGGCGATCGAGGGCTACTGGAAGGGCCGCGTC | | |
| | | | AGCGCGCCCGAACTCCGGTCCCTCGCCGCGGACCTGCG | | |
| | | | CGCCGCGAACTGGCGCCGACTGGCCGACGCCGGCATCG | | |
| | | | ACGAGGTGCCCGCCGGCGACTTCTCGTACTACGACCAC | | |
| | | | GTCCTCGACACCACCGTCATGGTCGGTGCGATCCCCGA | | |
| | | | GCGCCACCGCGCCGCCGTCGCGGCCGACGCCCTGGACG | | |
| | | | GCTACTTCGCCATGGCCCGCGGCACCCAGGAGGTCGCG | | |
| | | | CCGCTGGAGATGACCAAGTGGTTCGACACCAACTACCA | | |
| | | | CTATCTGGTTCCGGAGTTGGGTCCGGACACCGTCTTCA | | |
| | | | CGGCCGACTCCACCAAGCAGGTCACCGAGCTGGCGGAA | | |
| | | | GCCGTCGCCCTGGGCCTGACCGCCCGCCCCGTGCTGGT | | |
| | | | CGGCCCGGTCACCTATCTCCTGCTGGCCAAGCCGGCCC | | |
| | | | CCGGCGCCCCCGCGGACTTCGAGCCGCTCACCCTGCTC | | |
| | | | GACCGGCTCCTGCCGGTGTACGCCGAGGTCCTCACCGA | | |
| | | | CCTGCGCGCGGCCGGCGCCGAGTGGGTCCAGCTGGACG | | |
| | | | AGCCCGCCTTCGTGCAGGACCGCACCCCGGCGGAACTG | | |
| | | | AACGCCCTGGAACGCGCCTACCGGGAACTCGGCGCCCT | | |
| | | | GACCGACCGGCCCAAGCTGCTCGTCGCCTCCTACTTCG | | |
| | | | ACCGCCTCGGCGACGCGCTGCCCGTCCTGGCCAAGGCA | | |
| | | | CCGATCGAGGGTCTTGCCCTGGACTTCACCGACGCCGC | | |
| | | | CGCGACCAACCTGGACGCCTTGGCCGCCGTCGGCGGAC | | |
| | | | TGCCCGGCAAGCGCCTCGTCGCCGGTGTCGTCAACGGC | | |
| | | | CGCAACATCTGGATCAACGACCTGCAGAAGTCGTTGTC | | |
| | | | CACGCTCGGCACGCTGCTGGGTCTCGCGGACCGGGTCG | | |
| | | | ACGTGTCCGCCTCCTGCTCCCTCCTCCATGTGCCCCTC | | |
| | | | GACACCGGGGCGGAGCGGGACATCGAGCCGCAGATCCT | | |
| | | | GCGCTGGCTGGCCTTCGCCCGGCAGAAGACCGCCGAGA | | |
| | | | TCGTCACCCTCGCCAAGGGCCTCGCCCAGGGCACCGAC | | |
| | | | GCCATCACCGGCGAACTCGCCGCCAGCCGCGCCGACAT | | |
| | | | GGCCTCCCGCGCCGGCTCACCGATCACCCGCAACCCGG | | |
| | | | CCGTACGAGCCCGTGCCGAGGCCGTGACGGACGACGAC | | |
| | | | GCCCGTCGCTCCCAGCCGTACGCCGAACGGACCGCCGC | | |
| | | | CCAGCGGGCACACCTGGGGCTGCCGCCGCTGCCGACCA | | |
| | | | CGACCATCGGCTCGTTCCCGCAGACCGGCGAGATCCGG | | |
| | | | GCCGCCCGTGCCGACCTGCGCGACGGCCGCATCGACAT | | |
| | | | CGCCGGCTACGAGGAACGGATCCGGGCCGAGATCCAGG | | |
| | | | AGGTGATCTCCTTCCAGGAGAAGACCGGCCTGGACGTC | | |
| | | | CTGGTGCACGGCGAGCCCGAACGCAACGACATGGTCCA | | |
| | | | GTACTTCGCCGAACAGCTGACCGGGTATCTGGCCACGC | | |
| | | | AGCACGGCTGGGTCCAGTCCTACGGCACCCGCTACGTC | | |
| | | | CGCCCGCCGATCCTGGCCGGGGACATCTCCCGCCCCGA | | |
| | | | GCCGATGACGGTGCGCTGGACGACGTACGCCCAGTCGC | | |
| | | | TCACCGAGAAGCCGGTCAAGGGCATGCTCACCGGCCCG | | |
| | | | GTGACCATGCTCGCATGGTCCTTCGTCCGCGACGACCA | | |
| | | | GCCCCTCGGTGACACCGCCCGCCAGGTCGCCCTCGCCC | | |
| | | | TGCGCGACGAGGTGAACGACCTGGAGGCGGCCGGGACC | | |
| | | | TCGGTCATCCAGGTCGACGAACCCGCCCTGCGCGAGAC | | |
| | | | ACTGCCGCTGCGGGCCGCCGACCACACCGCCTACCTGG | | |
| | | | CCTGGGCGACGGAGGCGTTCCGGCTGACCACCTCTGGC | | |
| | | | GTCCGCCCGGACACCCAGATCCACACCCACATGTGCTA | | |
| | | | CGCCGAGTTCGGCGACATCGTCCAGGCCATCGACGACC | | |
| | | | TCGACGCCGACGTCATCAGCCTGGAAGCCGCTCGCTCA | | |
| | | | CACATGCAGGTAGCCCACGAACTCGCTACCCACGGCTA | | |
| | | | CCCGCGCGAAGCCGGACCCGGCGTGTACGACATCCACT | | |
| | | | CCCCGCGCGTCCCGAGCGCCGAGGAAGCCGCCGCACTG | | |
| | | | CTGCGCACCGGCCTCAAGGCGATTCCTGCCGAACGGCT | | |
| | | | GTGGGTCAACCCCGACTGCGGTCTGAAGACCCGCGGCT | | |
| | | | GGCCCGAGACCCGCGCCTCCCTGGAGAACCTGGTCGCC | | |
| | | | ACCGCCCGCACCCTCCGCGGAGAGCTGTCCGCTTCCTGA | | |
| metE | Coryne- | AX371335 | ATGACTTCCAACTTTTCTTCCACTGTCGCTGGTCTTCC | 262 | |
| | bacterium | | TCGCATCGGAGCGAAGCGTGAACTGAAGTTCGCGCTCG | | |
| | glutamicum | | AAGGCTACTGGAATGGATCAATTGAAGGTCGCGAACTT | | |
| | | | CGGCAGACCGCCCGCCAATTGGTCAACACTGCATCGGA | | |
| | | | TTCTTTGTCTGGATTGGATTCCGTTCCGTTTGCAGGAC | | |
| | | | GTTCCTACTACGACGCAATGCTCGATACCGCCGCTATT | | |
| | | | TTGGGTGTGCTGCCGGAGCGTTTTGATGACATCGCTGA | | |
| | | | TCATGAAAACGATGGTCTCCCACTGTGGATTGACCGCT | | |
| | | | ACTTTGGCGCTGCTCGCGGTACTGAGACCCTGCCTGCA | | |
| | | | CAGGCAATGACCAAGTGGTTTGATACCAACTACCACTA | | |
| | | | CCTCGTGCCGGAGTTGTCTGCGGATACACGTTTCGTTT | | |
| | | | TGGATGCGTCCGCGCTGATTGAGGATCTCCGTTGCCAG | | |
| | | | CAGGTTCGTGGCGTTAATGCCCGCCCTGTTCTGGTTGG | | |
| | | | TCCACTGACTTTCCTTTCCCTTGCTCGCACCACTGATG | | |
| | | | GTTCCAATCCTTTGGATCACCTGCCTGCACTGTTTGAG | | |
| | | | GTCTACGAGCGCCTCATCAAGTCTTTCGATACTGAGTG | | |
| | | | GGTTCAGATCGATGAGCCTGCGTTGGTCACCGATGTTG | | |
| | | | CTCCTGAGGTTTTGGAGCAGGTCCGCGCTGGTTACACC | | |
| | | | ACTTTGGCTAAGCGCGATGGCGTGTTTGTCAATACTTA | | |
| | | | CTTCGGCTCTGGCGATCAGGCGCTGAACACTCTTGCGG | | |
| | | | GCATCGGCCTTGGCGCGATTGGCGTTGACTTGGTCACC | | |
| | | | CATGGCGTCACTGAGCTTGCTGCGTGGAAGGGTGAGGA | | |
| | | | GCTGCTGGTTGCGGGCATCGTTGATGGTCGTAACATTT | | |
| | | | GGCGCACCGACCTGTGTGCTGCTCTTGCTTCCCTGAAG | | |
| | | | CGCCTGGCAGCTCGCGGCCCAATCGCAGTGTCTACCTC | | |
| | | | TTGTTCACTGCTGCACGTTCCTTACACCCTCGAGGCTG | | |
| | | | AGAACATTGAGCCTGAGGTCCGCGACTGGCTTGCCTTC | | |
| | | | GGCTCGGAGAAGATCACCGAGGTCAAGCTGCTTGCCGA | | |
| | | | CGCCCTAGCCGGCAACATCGACGCGGCTGCGTTCGATG | | |
| | | | CGGCGTCCGCAGCAATTGCTTCTCGACGCACCTCCCCA | | |
| | | | CGCACCGCACCAATCACGCAGGAACTCCCTGGCCGTAG | | |
| | | | CCGTGGATCCTTCGACACTCGTGTTACGCTGCAGGAGA | | |
| | | | AGTCACTGGAGCTTCCAGCTCTGCCAACCACCACCATT | | |
| | | | GGTTCTTTCCCACAGACCCCATCCATTCGTTCTGCTCG | | |
| | | | CGCTCGTCTGCGCAAGGAATCCATCACTTTGGAGCAGT | | |
| | | | ACGAAGAGGCAATGCGCGAAGAAATCGATCTGGTCATC | | |
| | | | GCCAAGCAGGAAGAACTTGGTCTTGATGTGTTGGTTCA | | |
| | | | CGGTGAGCCAGAGCGCAACGACATGGTTCAGTACTTCT | | |
| | | | CTGAACTTCTCGACGGTTTCCTCTCAACCGCCAACGGC | | |
| | | | TGGGTCCAAAGCTACGGCTCCCGCTGTGTTCGTCCTCC | | |
| | | | AGTGTTGTTCGGAAACGTTTCCCGCCCAGCGCCAATGA | | |
| | | | CTGTCAAGTGGTTCCAGTACGCACAGAGCCTGACCCAG | | |
| | | | AAGCATGTCAAGGGAATGCTCACCGGTCCAGTCACCAT | | |
| | | | CCTTGCATGGTCCTTCGTTCGCGATGATCAGCCGCTGG | | |
| | | | CTACCACTGCTGACCAGGTTGCACTGGCACTGCGCGAT | | |
| | | | GAAATTAACGATCTCATCGAGGCTGGCGCGAAGATCAT | | |
| | | | CCAGGTGGATGAGCCTGCGATTCGTGAACTGTTGCCGC | | |
| | | | TACGAGACGTCGATAAGCCTGCCTACCTGCAGTGGTCC | | |
| | | | GTGGACTCCTTCCGCCTGGCGACTGCCGGCGCACCCGA | | |
| | | | CGACGTCCAAATCCACACCCACATGTGCTACTCCGAGT | | |
| | | | TCAACGAAGTGATCTCCTCGGTCATCGCGTTGGATGCC | | |
| | | | GATGTCACCACCATCGAAGCAGCACGTTCCGACATGCA | | |
| | | | GGTCCTCGCTGCTCTGAAATCTTCCGGCTTCGAGCTCG | | |
| | | | GCGTCGGACCTGGTGTGTGGGATATCCACTCCCCGCGC | | |
| | | | GTTCCTTCCGCGCAGGAAGTGGACGGTCTCCTCGAGGC | | |
| | | | TGCACTGCAGTCCGTGGATCCTCGCCAGCTGTGGGTCA | | |
| | | | ACCCAGACTGTGGTCTGAAGACCCGTGGATGGCCAGAA | | |
| | | | GTGGAAGCTTCCCTAAAGGTTCTCGTTGAGTCCGCTAA | | |
| | | | GCAGGCTCGTGAGAAAATCGGAGCAACTATCTAA | | |
| metE | Escherichia coli | AE016769 | ATGACAATTCTTAATCACACCCTCGGTTTCCCTCGCGT | 263 | |
| | | | TGGCCTGCGTCGCGAGCTGAAAAAAGCGCAAGAGAGTT | | |
| | | | ATTGGGCGGGGAACTCCACGCGTGAAGAACTGCTGGCG | | |
| | | | GTAGGGCGTGAATTGCGTGCTCGTCACTGGGATCAACA | | |
| | | | AAAGCAAGCGGGTATCGACCTGCTGCCGGTGGGCGATT | | |
| | | | TTGCCTGGTACGATCATGTACTGACCACCAGTCTGCTG | | |
| | | | CTGGGTAATGTTCCGCCACGTCATCAGAACAAAGATGG | | |
| | | | TTCGGTAGATATCGACACCCTGTTCCGTATTGGTCGTG | | |
| | | | GACGTGCACCGACTGGCGAACCTGCGGCGGCAGCGGAA | | |
| | | | ATGACCAAATGGTTTAACACCAACTATCACTACATGGT | | |
| | | | GCCGGAGTTCGTTAAAGGCCAACAGTTCAAACTGACCT | | |
| | | | GGACGCAGCTGCTGGAGGAAGTGGACGAGGCGCTGGCG | | |
| | | | CTGGGCCACAAGGTGAAACCTGTGCTGCTGGGGCCGAT | | |
| | | | TACCTACCTGTGGCTGGGTAAAGTGAAAGGTGAACAGT | | |
| | | | TTGATCGCCTGAGCCTGCTGAACGACATTCTGCCGGTT | | |
| | | | TATCAGCAAGTGCTGGCAGAACTGGCGAAACGCGGCAT | | |
| | | | CGAGTGGGTACAGATTGATGAACCCGCGTTGGTACTGG | | |
| | | | AACTGCCGCAGGCGTGGCTGGACGCATACAAACCCGCT | | |
| | | | TACGACGCGCTCCAGGGACAGGTGAAACTGCTGCTGAC | | |
| | | | CACCTATTTTGAAGGCGTAACGCCAAACCTCGACACGA | | |
| | | | TTACTGCGCTGCCTGTTCAGGGTCTGCATGTCGATCTc | | |
| | | | GTACATGGTAAAGATGACGTTGCTGAACTGCACAAGCG | | |
| | | | TCTGCCTTCTGACTGGCTGCTGTCTGCGGGTCTTATCA | | |
| | | | ATGGTCGTAACGTCTGGCGCGCCGATCTTACCGAGAAA | | |
| | | | TATGCGCAAATTAAGGACATTGTCGGCAAACGCGATTT | | |
| | | | GTGGGTGGCATCTTCCTGCTCGTTGCTGCACAGCCCCA | | |
| | | | TCGACTTGAGCGTGGAAACGCGTCTTGATGCAGAAGTG | | |
| | | | AAAAGCTGGTTTGCCTTCGCCCTGCAAAAATGTCATGA | | |
| | | | ACTGGCATTGCTGCGCGATGCGTTGAACAGTGGTGATA | | |
| | | | CGGCAGCTCTGGCAGAGTGGAGCGCTCCGATTCAGGCG | | |
| | | | CGTCGTCACTCTACTCGTGTACATAATCCGGCAGTAGA | | |
| | | | AAAGCGTCTGGCGGCGATCACCGCCCAGGACAGTCAGC | | |
| | | | GTGCGAATGTCTATGAAGTGCGTGCTGAAGCTCAGCGT | | |
| | | | GCGCGTTTTAAACTGCCCGCGTGGCCGACCACCACGAT | | |
| | | | TGGTTCCTTCCCGCAAACCACGGAGATTCGTACCCTGC | | |
| | | | GTCTGGATTTTAAAAAGGGTAATCTCGACGCCAATAAC | | |
| | | | TACCGCACGGGCATTGCGGAACATATCAAGCAGGCCAT | | |
| | | | TGTTGAGCAGGAACGTTTGGGACTGGATGTGCTGGTAC | | |
| | | | ATGGCGAGGCCGAGCGTAATGACATGGTGGAATACTTT | | |
| | | | GGCGAGCATCTGGATGGCTTTGTCTTTACGCAAAACGG | | |
| | | | TTGGGTACAGAGCTACGGTTCCCGCTGCGTGAAGCCAC | | |
| | | | CGATTGTTATTGGTGACGTTAGCCGCCCGGCACCGATT | | |
| | | | ACCGTGGAGTGGGCAAAATATGCGCAATCCCTGACTGA | | |
| | | | TAAACCGGTGAAAGGGATGTTGACCGGCCCGGTGACTA | | |
| | | | TTCTCTGCTGGTCGTTCCCGCGTGAAGATGTCAGCCGT | | |
| | | | GAAACCATCGCCAAACAAATTGCGCTGGCGCTGCGTGA | | |
| | | | TGAAGTCGCGGACCTGGAAGCCGCTGGAATTGGCATCA | | |
| | | | TTCAGATTGACGAACCGGCATTGCGCGAAGGTTTACCA | | |
| | | | CTGCGTCGCAGCGACTGGGATGCCTATCTCCAGTGGGG | | |
| | | | CGTGGAGGCTTTCCGTATCAACGCCGCCGTGGCGAAAG | | |
| | | | ATGACACACAAATCCACACTCACATGTGTTACTGCGAG | | |
| | | | TTCAACGACATCATGGATTCGATTGCGGCGCTGGACGC | | |
| | | | AGACGTCATCACCATCGAAACCTCGCGTTCCGACATGG | | |
| | | | AGTTGCTGGAGTCGTTTGAAGAGTTTGATTATCCAAAT | | |
| | | | GAAATCGGTCCTGGCGTCTATGACATTCACTCGCCAAA | | |
| | | | CGTACCGAGCGTGGAATGGATTGAAGCCTTGCTGAAGA | | |
| | | | AAGCGGCAAAACGCATTCCGGCAGAGCGTCTGTGGGTC | | |
| | | | AACCCGGACTGTGGCCTGAAAACGCGCGGCTGGCCAGA | | |
| | | | AACCCGCGCGGCACTGGCGAACATGGTGCAGGCGGCGC | | |
| | | | AGAATTTGCGTCGGGGA | | |
| glyA | Streptomyces | AL939123 | ATGTCGCTTCTGAACACACCCCTGCACGAGCTGGACCC | 149 | |
| | coelicolor | | GGACGTCGCCGCCGCCGTCGACGCCGAGCTGGACCGCC | | |
| | | | AGCAGTCCACCCTCGAGATGATCGCGTCGGAGAACTTC | | |
| | | | GCCCCGGTCGCGGTCATGGAGGCCCAGGGCTCGGTCCT | | |
| | | | CACCAACAAGTACGCCGAGGGCTACCCCGGCCGCCGCT | | |
| | | | ACTACGGCGGCTGCGAGCACGTCGACGTGGTCGAGCAG | | |
| | | | ATCGCCATCGACCGGGTCAAGGCGCTCTTCGGCGCCGA | | |
| | | | GCACGCCAACGTGCAGCCGCACTCGGGCGCCCAGGCCA | | |
| | | | ACGCGGCCGCGATGTTCGCGCTGCTCAAGCCCGGCGAC | | |
| | | | ACGATCATGGGTCTGAACCTCGCGCACGGCGGGCACCT | | |
| | | | GACCCACGGCATGAAGATCAACTTCTCCGGCAAGCTCT | | |
| | | | ACAACGTGGTCCCCTACCACGTCGGCGACGACGGCCAG | | |
| | | | GTCGACATGGCCGAGGTGGAGCGCCTGGCCAAGGAGAC | | |
| | | | CAAGCCGAAGCTGATCGTGGCGGGCTGGTCGGCCTACC | | |
| | | | CGCGTCAGCTGGACTTCGCCGCGTTCCGCAAGGTCGCG | | |
| | | | GACGAGGTCGGCGCGTACCTGATGGTCGACATGGCGCA | | |
| | | | CTTCGCCGGTCTGGTCGCGGCGGGCCTGCACCCGAACC | | |
| | | | CGGTCCCGCACGCCCACGTCGTCACCACGACCACCCAC | | |
| | | | AAGACGCTGGGCGGTCCGCGCGGCGGTGTGATCCTCTC | | |
| | | | CACGGCCGAGCTGGCCAAGAAGATCAACTCCGCCGTCT | | |
| | | | TCCCCGGTCAGCAGGGTGGCCCGCTGGAGCACGTGGTG | | |
| | | | GCCGCCAAGGCCGTCGCCTTCAAGGTCGCCGCGAGCGA | | |
| | | | GGACTTCAAGGAGCGCCAGGGCCGTACGCTGGAGGGTG | | |
| | | | CCCGCATCCTGGCCGAGCGCCTGGTGCGGGACGACGCG | | |
| | | | AAGGCCGCGGGCGTCTCCGTCCTGACCGGCGGCACGGA | | |
| | | | CGTCCACCTGGTCCTGGTGGACCTGCGCGACTCCGAGC | | |
| | | | TGGACGGACAGCAGGCCGAGGACCGCCTCCACGAGGTC | | |
| | | | GGCATCACGGTCAACCGCAACGCCGTCCCGAACGACCC | | |
| | | | GCGCCCGCCGATGGTGACCTCCGGTCTGCGCATCGGTA | | |
| | | | CGCCGGCCCTGGCGACCCGCGGCTTCACCGCCGAGGAC | | |
| | | | TTCGCCGAGGTCGCGGACGTGATCGCCGAGGCGCTGAA | | |
| | | | GCCGTCCTACGACGCGGAGGCCCTCAAGGCCCGGGTGA | | |
| | | | AGACCCTGGCCGACAAGCACCCGCTGTACCCGGGTCTG | | |
| | | | AACAAGTAG | | |
| glyA | Thermobifida | NZ_AAAQ010 | GTGAAGGTTAGGAAACTCATGACCGCCCAGAGCACTTC | 150 | |
| | fusca | 00038 | GCTCACCCAGTCGCTGGCTCAGCTCGACCCTGAGGTCG | | |
| | | | CGGCAGCCGTGGACGCCGAGCTCGCCCGCCAGCGCGAC | | |
| | | | ACCTTGGAGATGATCGCCTCCGAAAACTTTGCGCCCCG | | |
| | | | GGCGGTGCTGGAGGCGCAAGGCACGGTGCTGACCAACA | | |
| | | | AGTACGCGGAAGGCTACCCGGGCCGCCGCTACTACGGC | | |
| | | | GGGTGTGAGCACGTGGACGTCATCGAACAGCTGGCCAT | | |
| | | | CGACCGTGCCAAGGCCCTGTTCGGTGCCGAGCACGCCA | | |
| | | | ACGTGCAGCCGCACTCGGGCGCTCAGGCGAACACCGCC | | |
| | | | GTGTACTTTGCGCTGCTGCAGCCGGGCGACACCATCCT | | |
| | | | GGGCCTGGACCTCGCACACGGCGGGCACCTCACCCACG | | |
| | | | GCATGCGGATCAACTACTCCGGCAAGATCCTCAACGCC | | |
| | | | GTGGCCTACCACGTACGCGAGTCCGACGGCCTGATCGA | | |
| | | | CTACGACGAGGTCGAAGCGCTAGCCAAGGAGCACCAGC | | |
| | | | CGAAACTGATCATCGCGGGCTGGTCGGCGTACCCGCGC | | |
| | | | CAGTTGGACTTTGCCCGGTTCCGGGAGATCGCCGACCA | | |
| | | | GACAGGCGCCCTCCTCATGGTGGATATGGCGCATTTCG | | |
| | | | CGGGTCTGGTCGCGGCTGGACTGCACCCCAACCCGGTC | | |
| | | | CCCTACGCCGACGTAGTGACCACCACCACCCACAAGAC | | |
| | | | CTTGGGCGGGCCGCGAGGCGGGCTCATCCTGGCCAAGG | | |
| | | | AGGAGCTGGGCAAGAAGATCAACTCGGCGGTGTTCCCG | | |
| | | | GGGATGCAGGGCGGTCCGCTCCAGCACGTCATCGCTGC | | |
| | | | CAAGGCCGTAGCGTTGAAGGTCGCGGCCAGCGAAGAGT | | |
| | | | TCGCTGAGCGGCAGCGGCGCACCCTTTCCGGCGCGAAG | | |
| | | | ATCCTCGCCGAGCGGCTCACCCAGCCTGACGCGGCCGA | | |
| | | | GGCCGGTATTCGGGTGCTGACCGGCGGCACCGACGTCC | | |
| | | | ACCTGGTCCTGGTCGACCTGGTCAACTCGGAACTCAAC | | |
| | | | GGCAAAGAGGCGGAGGACCGGCTGCACGAGATCGGTAT | | |
| | | | CACGGTCAACCGCAACGCGGTCCCCAACGACCCGCGGC | | |
| | | | CGCCCATGGTCACGTCGGGACTGCGGATCGGCACCCCG | | |
| | | | GCTCTCGCCACCCGCGGTTTCGGCGACGCCGACTTCGC | | |
| | | | TGAGGTCGCCGACATCATCGCTGAGGCGCTCAAGCCGG | | |
| | | | GCTTCGACGCGGCGACCCTGCGCTCCCGCGTCCAGGCG | | |
| | | | CTGGCCGCCAAGCACCCGCTCTACCCTGGACTGTGA | | |
| glyA | Mycobacterium | E006993 | ATGTCTGCCCCGCTCGCTGAGGTTGACCCCGATATCGC | 151 | |
| | tuberculosis | | CGAGTTGCTGGCCAAGGAGCTTGGTCGGCAACGAGACA | | |
| | (use this to | | CCCTGGAGATGATCGCCTCGGAGAACTTCGCACCGCGC | | |
| | clone M. | | GCTGTGCTGCAGGCCCAGGGCAGTGTGCTGACCAACAA | | |
| | smegmatis | | GTACGCCGAGGGACTGCCCGGGCGGCGCTACTACGGCG | | |
| | gene) | | GTTGTGAGCACGTCGACGTGGTGGAAAACCTCGCCCGC | | |
| | | | GACCGAGCCAAGGCGTTGTTCGGTGCCGAATTCGCCAA | | |
| | | | TGTGCAACCGCATTCGGGCGCTCAGGCCAACGCCGCGG | | |
| | | | TGCTGCATGCGCTGATGTCACCCGGCGAGCGGCTGTTG | | |
| | | | GGTCTGGACCTGGCCAACGGTGGTCACCTGACCCATGG | | |
| | | | CATGCGGCTGAACTTCTCCGGCAAGCTCTACGAGAATG | | |
| | | | GCTTCTACGGCGTCGACCCGGCGACACATCTGATCGAC | | |
| | | | ATGGATGCGGTGCGGGCCACCGCACTCGAATTCCGCCC | | |
| | | | GAAGGTGATCATCGCCGGCTGGTCGGCCTACCCGCGGG | | |
| | | | TGCTCGACTTCGCGGCGTTCCGGTCGATCGCCGACGAG | | |
| | | | GTCGGGGCCAAGTTGCTCGTGGACATGGCGCATTTCGC | | |
| | | | GGGTCTGGTCGCCGCGGGGTTGCACCCGTCGCCGGTGC | | |
| | | | CGCACGCGGATGTGGTGTCCACCACCGTGCACAAGACG | | |
| | | | CTCGGCGGCGGCCGCTCCGGCCTGATCGTCGGTAAGCA | | |
| | | | GCAGTACGCCAAGGCGATCAACTCGGCGGTGTTTCCCG | | |
| | | | GGCAGCAGGGCGGTCCGCTCATGCACGTCATTGCCGGC | | |
| | | | AAGGCGGTCGCGTTGAAGATCGCCGCCACACCCGAATT | | |
| | | | TGCCGACCGGCAGCGGCGCACGCTGTCCGGGGCCCGGA | | |
| | | | TCATTGCCGATCGACTGATGGCTCCCGATGTCGCCAAG | | |
| | | | GCCGGTGTGTCGGTGGTCAGCGGCGGCACCGACGTCCA | | |
| | | | CCTGGTGCTGGTCGATCTGCGTGATTCCCCACTGGATG | | |
| | | | GCCAGGCCGCCGAGGACCTGCTGCACGAGGTCGGCATC | | |
| | | | ACGGTCAACCGCAACGCCGTCCCCAATGATCCCCGACC | | |
| | | | GCCGATGGTGACCTCGGGCCTGCGGATAGGCACGCCCG | | |
| | | | CGCTGGCGACCCGCGGCTTCGGCGACACCGAGTTCACC | | |
| | | | GAGGTCGCCGACATTATTGCGACCGCGCTGGCGACCGG | | |
| | | | CAGTTCCGTTGATGTGTCGGCGCTTAAGGATCGGGCGA | | |
| | | | CCCGGCTGGCCAGGGCGTTTCCGCTCTACGACGGGCTC | | |
| | | | GAGGAGTGGAGTCTGGTCGGCCGCTGA | | |
| glyA | Mycobacterium | AL049491 | ATGGTCGCGCCGCTGGCTGAAGTCGACCCGGATATCGC | 152 | |
| | leprae (use this | | CGAGCTACTGGGCAAAGAGCTAGGCCGGCAACGGGACA | | |
| | to clone M. | | CCTTGGAGATGATCGCTTCAGAGAACTTTGTGCCGCGC | | |
| | smegmatis | | TCGGTTCTACAGGCCCAAGGCAGCGTGCTGACCAACAA | | |
| | gene) | | GTACGCTGAGGGGTTGCCCGGCCGACGCTATTACGACG | | |
| | | | GCTGCGAGCACGTCGACGTCGTGGAGAACATCGCCCGC | | |
| | | | GACCGGGCCAAGGCGCTGTTCGGTGCCGACTTCGCCAA | | |
| | | | CGTGCAGCCGCACTCGGGGGCCCAGGCCAACGCCGCGG | | |
| | | | TACTGCACGCGCTGATGTCTCCGGGGGAGCGGCTGCTG | | |
| | | | GGTCTGGATCTCGCCAATGGCGGTCATCTGACGCATGG | | |
| | | | CATGCGGCTGAACTTCTCCGGCAAGCTGTATGAAACCG | | |
| | | | GCTTTTATGGCGTCGACGCGACAACGCATCTCATCGAT | | |
| | | | ATGGACGCGGTGCGGGCCAAGGCGCTCGAATTCCGCCC | | |
| | | | GAAGGTGCTGATCGCTGGCTGGTCGGCCTATCCGCGGA | | |
| | | | TTCTGGACTTCGCTGCTTTTCGGTCGATCGCAGACGAA | | |
| | | | GTCGGCGCCAAGCTGTGGGTCGACATGGCGCATTTCGC | | |
| | | | GGGCCTGGTTGCGGTGGGGTTGCACCCGTCTCCAGTGC | | |
| | | | CGCATGCAGATGTGGTGTCCACGACCGTTCACAAGACT | | |
| | | | CTTGGCGGGGGCCGTTCCGGTTTGATCCTGGGCAAGCA | | |
| | | | GGAGTTCGCCACGGCCATCAACTCAGCGGTGTTTCCTG | | |
| | | | GCCAGCAGGGTGGACCGCTTATGCATGTCATCGCGGGC | | |
| | | | AAGGCGGTCGCGCTGAAGATTGCTACCACGCCTGAGTT | | |
| | | | CACCGACCGGCAGCAGCGCACGCTGGCCGGCGCCCGGA | | |
| | | | TTCTCGCCGATCGGCTTACCGCCGCTGATGTCACCAAG | | |
| | | | GCCGGGGTGTCGGTGGTCAGTGGTGGCACTGACGTCCA | | |
| | | | CCTAGTGCTGGTCGACCTGCGCAACTCCCCGTTCGACG | | |
| | | | GCCAGGCAGCAGAAGATCTGCTGCACGAGGTCGGCATC | | |
| | | | ACTGTCAACCGCAACGTGGTTCCCAATGACCCCCGGCC | | |
| | | | GCCGATGGTGACCTCAGGCCTGCGGATAGGAACCCCCG | | |
| | | | CGCTGGCAACCCGAGGGTTCGGTGAAGCGGAGTTCACC | | |
| | | | GAGGTCGCGGACATCATCGCGACGGTGCTGACCACTGG | | |
| | | | TGGCAGTGTCGATGTGGCCGCGCTGCGGCAGCAGGTTA | | |
| | | | CCCGACTTGCCAGGGACTTCCCGCTCTACGGGGGACTT | | |
| | | | GAGGACTGGAGCTTGGCCGGTCGCTAG | | |
| glyA | Lactobacillus | AL935258 | ATGAATTACCAGGAACAAGATCCAGAAGTATGGGCTGC | 153 | |
| | plantarum | | GATTAGTAAGGAACAGGCACGGCAACAACATAATATTG | | |
| | | | AGTTGATTGCTTCTGAGAACATCGTTTCAAAGGGCGTC | | |
| | | | CGGGCAGCGCAGGGGAGTGTGCTGACCAATAAATACTC | | |
| | | | TGAAGGCTATCCGGGTCACCGCTTTTACGGTGGTAACG | | |
| | | | AATACATTGACCAAGTGGAAACCTTAGCAATTGAACGG | | |
| | | | GCTAAGAAATTATTTGGTGCGGAATATGCTAATGTGCA | | |
| | | | ACCACACTCTGGTTCCCAAGCCAATGCGGCTGCATATA | | |
| | | | TGGCACTGATTCAACCTGGTGACCGGGTGATGGGGATG | | |
| | | | TCACTAGATGCTGGGGGACACTTAACACATGGATCTAG | | |
| | | | TGTGAACTTCTCTGGTAAACTTTACGATTTTCAAGGTT | | |
| | | | ATGGGCTCGATCCTGAAACCGCAGAATTAAACTATGAT | | |
| | | | GCAATTCTTGCACAAGCACAAGATTTTCAACCAAAGTT | | |
| | | | AATCGTTGCGGGGGCTTCTGCTTATAGTCGATTGATTG | | |
| | | | ATTTCAAGAAGTTTCGCGAGATTGCAGATCAAGTTGGG | | |
| | | | GCCTTATTGATGGTTGATATGGCTCATATTGCCGGCTT | | |
| | | | AGTTGCGGCCGGGCTACATCCTAATCCAGTGCCATATG | | |
| | | | CTGATGTGGTTACGACAACGACGCACAAAACGTTACGG | | |
| | | | GGGCCCCGTGGCGGTATGATTTTAGCGAAAGAAAAGTA | | |
| | | | TGGCAAGAAGATCAACTCAGCCGTTTTCCCTGGCAATC | | |
| | | | AGGGTGGGCCGTTGGATCACGTAATTGCGGGTAAAGCG | | |
| | | | ATTGCTTTGGGCGAAGACTTACAGCCTGAGTTTAAGGT | | |
| | | | TTATGCCCAACATATCATTGATAATGCCAAGGCAATGG | | |
| | | | CGAAGGTCTTCAATGACTCTGACTTGGTTCGGGTTATT | | |
| | | | TCTGGTGGCACGGACAATCATTTAATGACGATTGATGT | | |
| | | | CACTAAGTCTGGTTTGAACGGTCGCCAAGTACAAGATC | | |
| | | | TGTTAGATACGGTTTATATTACGGTCAACAAAGAAGCG | | |
| | | | ATTCCGAATGAGACGTTAGGGGCTTTCAAGACCTCTGG | | |
| | | | TATTCGGTTGGGAACACCTGCGATTACGACCCGTGGTT | | |
| | | | TTGACGAAGCTGATGCAACTAAGGTCGCTGAATTGATT | | |
| | | | TTGCAAGCGTTACAAGCACCGACAGATCAAGCAAATCT | | |
| | | | AGATGACGTTAAACAGCAAGCAATGGCTTTAACAGCGA | | |
| | | | AGCACCCGATCGATGTTGATTAA | | |
| glyA | Corynebacterium | AF327063 | ATGACCGATGCCCACCAAGCGGACGATGTCCGTTACCA | 264 | |
| | glutamicum | | GCCACTGAACGAGCTTGATCCTGAGGTGGCTGCTGCCA | | |
| | | | TCGCTGGGGAACTTGCCCGTCAACGCGATACATTAGAG | | |
| | | | ATGATCGCGTCTGAGAACTTCGTTCCCCGTTCTGTTTT | | |
| | | | GCAGGCGCAGGGTTCTGTTCTTACCAATAAGTATGCCG | | |
| | | | AGGGTTACCCTGGCCGCCGTTACTACGGTGGTTGCGAA | | |
| | | | CAAGTTGACATCATTGAGGATCTTGCACGTGATCGTGC | | |
| | | | GAAGGCTCTCTTCGGTGCAGAGTTCGCCAATGTTCAGC | | |
| | | | CTCACTCTGGCGCACAGGCTAATGCTGCTGTGCTGATG | | |
| | | | ACTTTGGCTGAGCCAGGCGACAAGATCATGGGTCTGTC | | |
| | | | TTTGGCTCATGGTGGTCACTTGACCCACGGAATGAAGT | | |
| | | | TGAACTTCTCCGGAAAGCTGTACGAGGTTGTTGCGTAC | | |
| | | | GGTGTTGATCCTGAGACCATGCGTGTTGATATGGATCA | | |
| | | | GGTTCGTGAGATTGCTCTGAAGGAGCAGCCAAAGGTAA | | |
| | | | TTATCGCTGGCTGGTCTGCATACCCTCGCCACCTTGAT | | |
| | | | TTCGAGGCTTTCCAGTCTATTGCTGCGGAAGTTGGCGC | | |
| | | | GAAGCTGTGGGTCGATATGGCTCACTTCGCTGGTCTTG | | |
| | | | TTGCTGCTGGTTTGCACCCAAGCCCAGTTCCTTACTCT | | |
| | | | GATGTTGTTTCTTCCACTGTCCACAAGACTTTGGGTGG | | |
| | | | ACCTCGTTCCGGCATCATTCTGGCTAAGCAGGAGTACG | | |
| | | | CGAAGAAGCTGAACTCTTCCGTATTCCCAGGTCAGCAG | | |
| | | | GGTGGTCCTTTGATGCACGCAGTTGCTGCGAAGGCTAC | | |
| | | | TTCTTTGAAGATTGCTGGCACTGAGCAGTTCCGTGACc | | |
| | | | GTCAGGCTCGCACGTTGGAGGGTGCTCGCATTCTTGCT | | |
| | | | GAGCGTCTGACTGCTTCTGATGCGAAGGCCGCTGGCGT | | |
| | | | GGATGTCTTGACCGGTGGCACTGATGTGCACTTGGTTT | | |
| | | | TGGCTGATCTGCGTAACTCCCAGATGGATGGCCAGCAG | | |
| | | | GCGGAAGATCTGCTGCACGAGGTTGGTATCACTGTGAA | | |
| | | | CCGTAACGCGGTTCCTTTCGATCCTCGTCCACCAATGG | | |
| | | | TTACTTCTGGTCTGCGTATTGGTACTCCTGCGCTGGCT | | |
| | | | ACCCGTGGTTTCGATATTCCTGCATTCACTGAGGTTGC | | |
| | | | AGACATCATTGGTACTGCTTTGGCTAATGGTAAGTCCG | | |
| | | | CAGACATTGAGTCTCTGCGTGGCCGTGTAGCAAAGCTT | | |
| | | | GCTGCAGATTACCCACTGTATGAGGGCTTGGAAGACTG | | |
| | | | GACCATCGTCTAA | | |
| glyA | Escherichia coli | V00283 | ATGTTAAAGCGTGAAATGAACATTGCCGATTATGATGC | 265 | |
| | | | CGAACTGTGGCAGGCTATGGAGCAGGAAAAAGTACGTC | | |
| | | | AGGAAGAGCACATCGAACTGATCGCCTCCGAAAACTAC | | |
| | | | ACCAGCCCGCGCGTAATGCAGGCGCAGGGTTCTCAGCT | | |
| | | | GACCAACAAATATGCTGAAGGTTATCCGGGCAAACGCT | | |
| | | | ACTACGGCGGTTGCGAGTATGTTGATATCGTTGAACAA | | |
| | | | CTGGCGATCGATCGTGCGAAAGAACTGTTCGGCGCTGA | | |
| | | | CTACGCTAACGTCCAGCCGCACTCCGGCTCCCAGGCTA | | |
| | | | ACTTTGCGGTCTACACCGCGCTGCTGGAACCAGGTGAT | | |
| | | | ACCGTTCTGGGTATGAACCTGGCGCATGGCGGTCACCT | | |
| | | | GACTCACGGTTCTCCGGTTAACTTCTCCGGTAAACTGT | | |
| | | | ACAACATCGTTCCTTACGGTATCGATGCTACCGGTCAT | | |
| | | | ATCGACTACGCCGATCTGGAAAAACAAGCCAAAGAACA | | |
| | | | CAAGCCGAAAATGATTATCGGTGGTTTCTCTGCATATT | | |
| | | | CCGGCGTGGTGGACTGGGCGAAAATGCGTGAAATCGCT | | |
| | | | GACAGCATCGGTGCTTACCTGTTCGTTGATATGGCGCA | | |
| | | | CGTTGCGGGCCTGGTTGCTGCTGGCGTCTACCCGAACC | | |
| | | | CGGTTCCTCATGCTCACGTTGTTACTACCACCACTCAC | | |
| | | | AAAACCCTGGCGGGTCCGCGCGGCGGCCTGATCCTGGC | | |
| | | | GAAAGGTGGTAGCGAAGAGCTGTACAAAAAACTGAACT | | |
| | | | CTGCCGTTTTCCCTGGTGGTCAGGGCGGTCCGTTGATG | | |
| | | | CACGTAATCGCCGGTAAAGCGGTTGCTCTGAAAGAAGC | | |
| | | | GATGGAGCCTGAGTTCAAAACTTACCAGCAGCAGGTCG | | |
| | | | CTAAAAACGCTAAAGCGATGGTAGAAGTGTTCCTCGAG | | |
| | | | CGCGGCTACAAAGTGGTTTCCGGCGGCACTGATAACCA | | |
| | | | CCTGTTCCTGGTTGATCTGGTTGATAAAAACCTGACCG | | |
| | | | GTAAAGAAGCAGACGCCGCTCTGGGCCGTGCTAACATC | | |
| | | | ACCGTCAACAAAAACAGCGTACCGAACGATCCGAAGAG | | |
| | | | CCCGTTTGTGACCTCCGGTATTCGTGTAGGTACTCCGG | | |
| | | | CGATTACCCGTCGCGGCTTTAAAGAAGCCGAAGCGAAA | | |
| | | | GAACTGGCTGGCTGGATGTGTGACGTGCTGGACAGCAT | | |
| | | | CAATGATGAAGCCGTTATCGAGCGCATCAAAGGTAAAG | | |
| | | | TTCTCGACATCTGCGCACGTTACCCGGTTTACGCATAA | | |
| metE | Thermobifida | NZ_AAAQ010 | ATGGCTTCGAGGGCGGCCAGCACCGGTTCCCACTCCGC | 154 | |
| | fusca | 00010 | GCCGATCTCCAGCAGCAGCGGGCGTCGGCTCGCGACGA | | |
| | | | AGGCCGCCAGTTCGGCATCGACAAGGGGGCGCACGAAG | | |
| | | | GCGACGGGAGACAAGTGCGAGGAGCTCATAAGGGCAGG | | |
| | | | CTACCGATTGTTCCGCCGCCCGTCTTCACCACGACACA | | |
| | | | CCCAAACCCCACCGATATGGTCGATTACAGTGGGAGAC | | |
| | | | ATGCTCGGATCACCCACGCCGCGCCCGGCGCCTCGTCC | | |
| | | | GCGCCGTATCAGCGAACTGTTGGCGCGTAAAGAGCCCA | | |
| | | | CGTTCTCCTTCGAGTTCTTCCCCCCGAAAACGCCCGAG | | |
| | | | GGGGAGCGCATGCTTTGGCGGGCGATCCGGGAGATCGA | | |
| | | | GGCCCTACGCCCTTCCTTCGTCTCGGTGACCTACGGTG | | |
| | | | CGGGCGGCAGCACCCGGGACCGGACCGTGAACGTCACC | | |
| | | | GAGAAGATCGCCACCAACACCACTCTGCTGCCCGTGGC | | |
| | | | GCACATCACCGCGGTCAACCACTCGGTGCGGGAGCTCC | | |
| | | | GCCACCTCATCGGCCGGTTCGCGGCGGCGGGGGTGTGC | | |
| | | | AACATGCTCGCGCTGCGCGGCGACCCGCCCGGCGACCC | | |
| | | | GCTGGGCGAATGGGTCAAGCACCCGGAGGGCCTCACCC | | |
| | | | ACGCCGAAGAACTGGTGCGGCTGATCAAGGAGAGCGGT | | |
| | | | GACTTCTGCGTCGGGGTGGCCGCATTCCCCTACAAGCA | | |
| | | | CCCCCGCTCCCCCGACGTGGAGACCGACACGGACTTCT | | |
| | | | TCGTCCGCAAATGCCGGGCAGGAGCGGACTACGCGATC | | |
| | | | ACCCAGATGTTCTTCGAAGCCGAGGACTACCTGCGGCT | | |
| | | | GCGGGACCGGGTCGCGGCCCGGGGCTGCGACGTGCCCA | | |
| | | | TCATCCCTGAGATCATGCCGGTCACGAAGTTCAGCACG | | |
| | | | ATCGCCCGCTCCGAGCAGTTGTCGGGAGCGCCGTTCCC | | |
| | | | CCGCAGGCTGGCGGAAGAGTTCGAACGGGTCGCCGACG | | |
| | | | ACCCCGAGGCGGTGCGCGCGCTCGGTATCGAGCACGCC | | |
| | | | ACTCGGCTGTGCGAACGGCTCCTCGCCGAAGGGGCGCC | | |
| | | | GGGCATCCACTTCATCACGTTCAACCGTTCGACGGCGA | | |
| | | | CCCGCGAGGTCTACCACCGGCTCGTGGGCGCCACCCAG | | |
| | | | CCGGCAGCGGTAGCTGCGCTGCCATGA | | |
| metE | Streptomyces | AL939111 | ATGGCCCTCGGAACCGCAAGCACGAGGACGGATCGCGC | 155 | |
| | coelicolor | | CCGCACGGTGCGTGACATCCTCGCCACCGGCAAGACGA | | |
| | | | CGTACTCGTTCGAGTTCTCGGCGCCGAAGACGCCCAAG | | |
| | | | GGCGAGAGGAACCTCTGGAGCGCGCTGCGGCGGGTCGA | | |
| | | | GGCCGTGGCCCCGGACTTCGTCTCCGTGACCTACGGCG | | |
| | | | CCGGCGGCTCCACGCGCGCCGGCACGGTCCGCGAGACC | | |
| | | | CAGCAGATCGTCGCCGACACCACGCTGACCCCGGTGGC | | |
| | | | CCACCTCACCGCCGTCGACCACTCCGTCGCCGAGCTGC | | |
| | | | GCAACATCATCGGCCAGTACGCCGACGCCGGGATCCGC | | |
| | | | AACATGCTGGCCGTGCGCGGCGACCCGCCCGGCGACCC | | |
| | | | GAACGCCGACTGGATCGCGCACCCCGAGGGCCTGACCT | | |
| | | | ACGCGGCCGAACTGGTCAGGCTCATCAAGGAGTCGGGC | | |
| | | | GACTTCTGCGTCGGCGTCGCGGCCTTCCCCGAGATGCA | | |
| | | | CCCGCGCTCCGCCGACTGGGACACGGACGTCACGAACT | | |
| | | | TCGTCGACAAGTGCCGGGCCGGCGCCGACTACGCCATC | | |
| | | | ACCCAGATGTTCTTCCAGCCCGACTCCTATCTCCGGCT | | |
| | | | GCGCGACCGGGTCGCCGCGGCCGGCTGCGCGACCCCGG | | |
| | | | TCATCCCCGAGGTCATGCCGGTGACCAGTGTGAAGATG | | |
| | | | CTGGAGAGGTTGCCGAAGCTCAGCAACGCCTCGTTCCC | | |
| | | | GGCGGAGTTGAAAGAGCGGATCCTCACAGCCAAGGACG | | |
| | | | ATCCGGCGGCTGTACGCTCGATCGGCATCGAGTTCGCC | | |
| | | | ACGGAGTTCTGCGCGCGGCTGCTGGCCGAGGGAGTGCC | | |
| | | | AGGACTGCACTTCATCACGCTCAACAACTCCACGGCGA | | |
| | | | CGCTGGAAATCTACGAGAACCTGGGCCTGCACCACCCA | | |
| | | | CCGCGGGCCTAG | | |
| metE | Coryne- | AX374883 | TTGGTGGAGGTGAATAAATGCCAGAGGCAGTCCCAACA | 266 | |
| | bacterium | | AAACACTCTCATCACACTAAGATACCCAGGCATGTCCC | | |
| | glutamicum | | TAACGAACATCCCAGCCTCATCTCAATGGGCAATTAGC | | |
| | | | GACGTTTTGAAGCGTCCTTCACCCGGCCGAGTACCTTT | | |
| | | | TTCTGTCGAGTTTATGCCACCCCGCGACGATGCAGCTG | | |
| | | | AAGAGCGTCTTTACCGCGCAGCAGAGGTCTTCCATGAC | | |
| | | | CTCGGTGCATCGTTTGTCTCCGTGACTTATGGTGCTGG | | |
| | | | CGGATCAACCCGTGAGAGAACCTCACGTATTGCTCGAC | | |
| | | | GATTAGCGAAACAACCGTTGACCACTCTGGTGCACCTG | | |
| | | | ACCCTGGTTAACCACACTCGCGAAGAGATGAAGGCAAT | | |
| | | | TCTTCGGGAATACCTAGAGCTGGGATTAACAAACCTGT | | |
| | | | TGGCGCTTCGAGGAGATCCGCCTGGAGACCCATTAGGC | | |
| | | | GATTGGGTGAGCACCGATGGAGGACTGAACTATGCCTC | | |
| | | | TGAGCTCATCGATCTTATTAAGTCCACTCCTGAGTTCC | | |
| | | | GGGAATTCGACCTCGGTATCGCCTCCTTCCCCGAAGGG | | |
| | | | CATTTCCGGGCGAAAACTCTAGAAGAAGACACCAAATA | | |
| | | | CACTCTGGCGAAGCTGCGTGGAGGGGCAGAGTACTCCA | | |
| | | | TCACGCAGATGTTCTTTGATGTGGAAGACTACCTGCGA | | |
| | | | CTTCGTGATCGCCTTGTCGCTGCAGACCCCATTCATGG | | |
| | | | TGCGAAGCCAATCATTCCTGGCATCATGCCCATTACCG | | |
| | | | AGCTGCGGTCTGTGCGTCGACAGGTCGAACTCTCTGGT | | |
| | | | GCTCAATTGCCGAGCCAACTAGAAGAATCACTTGTTCG | | |
| | | | AGCTGCAAACGGCAATGAAGAAGCGAACAAAGACGAGA | | |
| | | | TCCGCAAGGTGGGCATTGAATATTCCACCAATATGGCA | | |
| | | | GAGCGACTCATTGCCGAAGGTGCGGAAGATCTGCACTT | | |
| | | | CATGACGCTTAACTTCACCCGTGCAACCCAAGAAGTGT | | |
| | | | TGTACAACCTTGGCATGGCGCCTGCTTGGGGAGCAGAG | | |
| | | | CACGGCCAAGACGCGGTGCGTTAA | | |
| metE | Escherichia coli | NC_000913 | ATGAGCTTTTTTCACGCCAGCCAGCGGGATGCCCTGAA | 267 | |
| | | | TCAGAGCCTGGCAGAAGTCCAGGGGCAGATTAACGTTT | | |
| | | | CGTTCGAGTTTTTCCCGCCGCGTACCAGTGAAATGGAG | | |
| | | | CAGACCCTGTGGAACTCCATCGATCGCCTTAGCAGCCT | | |
| | | | GAAACCGAAGTTTGTATCGGTGACCTATGGCGCGAACT | | |
| | | | CCGGCGAGCGCGACCGTACGCACAGCATTATTAAAGGC | | |
| | | | ATTAAAGATCGCACTGGTCTGGAAGCGGCACCGCATCT | | |
| | | | TACTTGCATTGATGCGACGCCCGACGAGCTGCGCACCA | | |
| | | | TTGCACGCGACTACTGGAATAACGGTATTCGTCATATC | | |
| | | | GTGGCGCTGCGTGGCGATCTGCCGCCGGGAAGTGGTAA | | |
| | | | GCCAGAAATGTATGCTTCTGACCTGGTGACGCTGTTAA | | |
| | | | AAGAAGTGGCAGATTTCGATATCTCCGTGGCGGCGTAT | | |
| | | | CCGGAAGTTCACCCGGAAGCAAAAAGCGCTCAGGCGGA | | |
| | | | TTTGCTTAATCTGAAACGCAAAGTGGATGCCGGAGCCA | | |
| | | | ACCGCGCGATTACTCAGTTCTTCTTCGATGTCGAAAGC | | |
| | | | TACCTGCGTTTTCGTGACCGCTGTGTATCGGCGGGCAT | | |
| | | | TGATGTGGAAATTATTCCGGGAATTTTGCCGGTATCTA | | |
| | | | ACTTTAAACAGGCGAAGAAATTTGCCGATATGACCAAC | | |
| | | | GTGCGTATTCCGGCGTGGATGGCGCAAATGTTCGACGG | | |
| | | | TCTGGATGATGATGCCGAAACCCGCAAACTGGTTGGCG | | |
| | | | CGAATATTGCCATGGATATGGTGAAGATTTTAAGCCGT | | |
| | | | GAAGGAGTGAAAGATTTCCACTTCTATACGCTTAACCG | | |
| | | | TGCTGAAATGAGTTACGCGATTTGCCATACGCTGGGGG | | |
| | | | TTCGACCTGGTTTA | | |
| cysE | Mycobacterium | AE007080 | ATGCTGACGGCCATGCGGGGCGACATCCGAGCAGCCCG | 156 | |
| | tuberculosis | | GGAGCGGGATCCGGCGGCCCCTACCGCGCTGGAAGTCA | | |
| | (use this to | | TCTTCTGCTACCCGGGCGTGCACGCCGTGTGGGGCCAC | | |
| | clone M. | | CGCCTCGCCCACTGGCTGTGGCAGCGTGGCGCCAGGCT | | |
| | smegmatis | | GCTCGCGCGGGCAGCTGCCGAATTCACTCGCATCCTGA | | |
| | gene) | | CCGGTGTAGATATCCACCCCGGTGCCGTCATCGGTGCT | | |
| | | | CGCGTGTTCATCGACCACGCGACCGGCGTGGTGATCGG | | |
| | | | AGAAACCGCGGAGGTCGGCGACGACGTCACGATCTATC | | |
| | | | ACGGCGTCACTCTCGGCGGCAGTGGCATGGTTGGCGGG | | |
| | | | AAACGCCATCCCACCGTCGGTGACCGCGTGATCATCGG | | |
| | | | CGCCGGGGCCAAGGTCCTCGGTCCGATCAAGATCGGCG | | |
| | | | AGGACAGCCGGATCGGCGCCAATGCCGTCGTGGTCAAG | | |
| | | | CCCGTCCCGCCGAGCGCGGTGGTGGTCGGGGTGCCCGG | | |
| | | | GCAGGTCATCGGCCAAAGCCAGCCCAGTCCCGGCGGCC | | |
| | | | CGTTTGATTGGAGGCTGCCCGATCTCGTGGGAGCCAGC | | |
| | | | CTCGATTCGCTGCTCACCAGGGTGGCCAGGCTGGACGC | | |
| | | | CCTCGGCGGCGGCCCGCAAGCAGCAGGAGTCATCCGGC | | |
| | | | CACCCGAAGCCGGGATATGGCACGGCGAGGACTTCTCG | | |
| | | | ATCTGA | | |
| cysE | Mycobacterium | Z98741 | ATGTTTGCGGCAATCCGGCGTGATATCCAGGCAGCAAG | 157 | |
| | leprae (use this | | ACAGCGAGATCCGGCACAGCCCACGGTGCTGGAGGTCA | | |
| | to clone M. | | TCTGCTGCTACCCAGGCGTGCACGCCGTCTGGGGTCAT | | |
| | smegmatis | | CGAATCAGTCACTGGTTGTGGAATCGTCGCGCCAGACT | | |
| | gene) | | GGCCGCGCGGGCGTTCGCCGAACTCACCCGCATCCTGA | | |
| | | | CTGGGGTCGACATCCACCCCGGTGCCGTGCTCGGAGCC | | |
| | | | GGCCTGTTCATCGATCACGCGACCGGCGTGGTGATCGG | | |
| | | | GGAAACCGCGGAAGTGGGCGATGACGTCACCATCTTCC | | |
| | | | ATGGAGTCACTCTCGGCGGCACCGGCCGGGAAACGGGT | | |
| | | | AAACGTCACCCAACCATCGGGGATCGAGTAACCATCGG | | |
| | | | CGCCGGCGCCAAGGTCCTCGGTGCCATCAAGATCGGCG | | |
| | | | AGGACAGCCGGATTGGCGCCAACGCAGTCGTGGTCAAG | | |
| | | | GAGGTCCCAGCCAGCGCTGTGGCCGTCGGGGTTCCCGG | | |
| | | | ACAAATCATCAGCAGCGACAGCCCGGCCAACGGGGACG | | |
| | | | ATTCTGTGCTGCCCGACTTCGTGGGCGTCAGCCTGCAA | | |
| | | | TCCCTGCTCACCAGGGTGGCCAAGCTGGAAGCCGAAGA | | |
| | | | CGGCGGTTCGCAAACCTACCGCGTCATCCGGCTACCCG | | |
| | | | AAGCCGGGGTTTGGCACGGCGAGGACTTCTCAATCTGA | | |
| cysE | Lactobacillus | AL935252 | GTGTTTCAGACGGCTCGTGCCATTCTCAATCGTGACCC | 158 | |
| | plantarum | | CGCCGCGATCAATTTGCGGACAGTTATGTTGACCTATC | | |
| | | | CTGGTATTCACGCGCTCGCCTGGTACCGGGTTGCCCAT | | |
| | | | TATTTTGAAACACACCGTTTACCATTATTGGCCGCCTT | | |
| | | | GCTGAGCCAACATGCGGCCCGGCATACCGGGATTCTGA | | |
| | | | TTCACCCGGCCGCGCAAATTGGTCACCGGGTCTTCTTT | | |
| | | | GACCATGGTATTGGTACTGTCATTGGTGCAACGGCGGT | | |
| | | | CATTGAAGACGACGTTACAATTTTACACGGCGTCACTT | | |
| | | | TAGGCGCACGTAAAACCGAACAAGCTGGGCGCCGGCAT | | |
| | | | CCCTATGTTTGTCGCGGTGCTTTCATTGGTGCCCACGC | | |
| | | | CCAACTCTTGGGCCCTATTACGATTGGCGCCAACAGTA | | |
| | | | AAATTGGTGCTGGTGCGATTGTTTTAGACAGCGTTCCC | | |
| | | | GCCCACGTTACTGCGGTCGGTAACCCGGCCCATCTAGT | | |
| | | | TGCCACTCAATTGCATGCTTATCATGAAGCAACCAGCA | | |
| | | | ATCAAGCTTGA | | |
| cysE | Corynebacterium | AX405283 | ATGCTCTCGACAATAAAAATGATCCGTGAAGATCTCGC | 268 | |
| | glutamicum | | AAACGCTCGTGAACACGATCCAGCAGCCCGAGGCGATT | | |
| | | | TAGAAAACGCAGTGGTTTACTCCGGACTCCACGCCATC | | |
| | | | TGGGCACATCGAGTTGCCAACAGCTGGTGGAAATCCGG | | |
| | | | TTTCCGCGGCCCCGCCCGCGTATTAGCCCAATTCACCC | | |
| | | | GATTCCTCACCGGCATTGAAATTCACCCCGGTGCCACC | | |
| | | | ATTGGTCGTCGCTTTTTTATTGACCACGGAATGGGAAT | | |
| | | | CGTCATCGGCGAAACCGCTGAAATCGGCGAAGGCGTCA | | |
| | | | TGCTCTACCACGGCGTCACCCTCGGCGGACAGGTTCTC | | |
| | | | ACCCAAACCAAGCGCCACCCCACGCTCTGCGACAACGT | | |
| | | | GACAGTCGGCGCGGGCGCAAAAATCTTAGGTCCCATCA | | |
| | | | CCATCGGCGAAGGCTCCGCAATTGGCGCCAATGCAGTT | | |
| | | | GTCACCAAAGACGTGCCGGCAGAACACATCGCAGTCGG | | |
| | | | AATTCCTGCGGTAGCACGCCCACGTGGCAAGACAGAGA | | |
| | | | AGATCAAGCTCGTCGATCCGGACTATTACATTTAA | | |
| cysE | Escherichia coli | NC_000913 | ATGTCGTGTGAAGAACTGGAAATTGTCTGGAACAATAT | 269 | |
| | | | TAAAGCCGAAGCCAGAACGCTGGCGGACTGTGAGCCAA | | |
| | | | TGCTGGCCAGTTTTTACCACGCGACGCTACTCAAGCAC | | |
| | | | GAAAACCTTGGCAGTGCACTGAGCTACATGCTGGCGAA | | |
| | | | CAAGCTGTCATCGCCAATTATGCCTGCTATTGCTATCC | | |
| | | | GTGAAGTGGTGGAAGAAGCCTACGCCGCTGACCCGGAA | | |
| | | | ATGATCGCCTCTGCGGCCTGTGATATTCAGGCGGTGCG | | |
| | | | TACCCGCGACCCGGCAGTCGATAAATACTCAACCCCGT | | |
| | | | TGTTATACCTGAAGGGTTTTCATGCCTTGCAGGCCTAT | | |
| | | | CGCATCGGTCACTGGTTGTGGAATCAGGGGCGTCGCGC | | |
| | | | ACTGGCAATCTTTCTGCAAAACCAGGTTTCTGTGACGT | | |
| | | | TCCAGGTCGATATTCACCCGGCAGCAAAAATTGGTCGC | | |
| | | | GGTATCATGCTTGACCACGCGACAGGCATCGTCGTTGG | | |
| | | | TGAAACGGCGGTGATTGAAAACGACGTATCGATTCTGC | | |
| | | | AATCTGTGACGCTTGGCGGTACGGGTAAATCTGGTGGT | | |
| | | | GACCGTCACCCGAAAATTCGTGAAGGTGTGATGATTGG | | |
| | | | CGCGGGCGCGAAAATCCTCGGCAATATTGAAGTTGGGC | | |
| | | | GCGGCGCGAAGATTGGCGCAGGTTCCGTGGTGCTGCAA | | |
| | | | CCGGTGCCGCCGCATACCACCGCCGCTGGCGTTCCGGC | | |
| | | | TCGTATTGTCGGTAAACCAGACAGCGATAAGCCATCAA | | |
| | | | TGGATATGGACCAGCATTTCAACGGTATTAACCATACA | | |
| | | | TTTGAGTATGGGGATGGGATC | | |
| serA | Mycobacterium | AL021287 | GTGAGCCTGCCTGTTGTGTTGATCGCCGACAAACTTGC | 159 | |
| | tuberculosis | | CCCATCAACGGTTGCCGCCTTGGGAGATCAGGTCGAGG | | |
| | (use this to | | TGCGCTGGGTTGACGGTCCGGACCGAGACAAGCTGCTG | | |
| | clone M. | | GCCGCGGTGCCCGAAGCGGACGCGCTGCTGGTGCGATC | | |
| | smegmatis | | GGCCACCACGGTTGACGCCGAGGTGCTGGCCGCCGCCC | | |
| | gene) | | CCAAGCTCAAGATCGTCGCGCGCGCCGGCGTCGGGCTG | | |
| | | | GACAACGTCGACGTGGACGCCGCGACGGCCCGCGGCGT | | |
| | | | GCTGGTGGTCAACGCCCCGACGTCGAACATCCACAGCG | | |
| | | | CCGCGGAGCATGCGCTGGCGCTGCTGCTGGCCGCCTCA | | |
| | | | CGCCAGATTCCGGCGGCCGACGCGTCGCTGCGCGAGCA | | |
| | | | CACCTGGAAGCGTTCGTCGTTTTCCGGTACCGAGATCT | | |
| | | | TCGGCAAAACCGTCGGCGTGGTGGGTCTGGGCCGCATC | | |
| | | | GGGCAGTTGGTCGCCCAGCGGATCGCTGCGTTCGGCGC | | |
| | | | TTACGTCGTCGCCTATGACCCGTACGTTTCGCCGGCCC | | |
| | | | GTGCGGCGCAGCTGGGCATCGAACTGCTGTCCCTGGAC | | |
| | | | GACCTGCTGGCCCGCGCCGATTTCATCTCGGTGCACCT | | |
| | | | ACCGAAAACACCGGAGACGGCGGGACTGATCGACAAGG | | |
| | | | AGGCGCTGGCGAAGACCAAGCCGGGCGTCATCATCGTC | | |
| | | | AACGCCGCGCGCGGCGGCCTGGTGGACGAGGCGGCACT | | |
| | | | GGCCGACGCGATCACCGGCGGCCACGTGCGGGCGGCCG | | |
| | | | GTCTGGACGTGTTCGCCACCGAACCGTGCACCGACAGC | | |
| | | | CCGCTGTTCGAGCTGGCACAGGTGGTGGTCACACCGCA | | |
| | | | TCTGGGTGCGTCCACCGCGGAGGCGCAGGACCGGGCGG | | |
| | | | GCACCGACGTCGCCGAGAGCGTGCGGCTGGCCCTGGCA | | |
| | | | GGGGAATTCGTGCCCGACGCGGTCAACGTCGGCGGCGG | | |
| | | | AGTGGTCAACGAGGAGGTGGCGCCCTGGCTGGATCTGG | | |
| | | | TGCGTAAGCTCGGCGTGCTGGCGGGTGTGTTGTCCGAC | | |
| | | | GAACTGCCGGTGTCGTTGTCGGTGCAGGTGCGCGGTGA | | |
| | | | GCTGGCCGCCGAAGAGGTTGAGGTGCTGCGCCTTTCGG | | |
| | | | CGCTGCGCGGCCTGTTCTCGGCGGTGATCGAGGATGCG | | |
| | | | GTGACATTTGTCAACGCACCGGCATTGGCCGCCGAACG | | |
| | | | TGGCGTCACCGCCGAGATCTGTAAGGCCTCGGAAAGCC | | |
| | | | CCAACCACCGCAGCGTCGTCGACGTTCGCGCGGTCGGC | | |
| | | | GCGGACGGTTCGGTGGTGACCGTCTCGGGCACGCTGTA | | |
| | | | TGGCCCACAGCTGTCGCAGAAGATCGTGCAGATCAACG | | |
| | | | GCCGCCACTTTGATCTGCGCGCCCAGGGGATCAACCTG | | |
| | | | ATCATCCACTACGTCGACCGGCCGGGAGCGCTGGGCAA | | |
| | | | GATCGGCACGTTGCTGGGGACGGCCGGGGTGAATATCC | | |
| | | | AGGCCGCGCAGCTCTCCGAAGACGCCGAAGGCCCGGGC | | |
| | | | GCGACGATTCTGCTGCGGCTGGACCAAGACGTGCCCGA | | |
| | | | CGACGTGCGGACGGCGATCGCGGCGGCGGTGGACGCCT | | |
| | | | ACAAGCTCGAGGTTGTCGATCTGTCGTGA | | |
| serA | Mycobacterium | Z99263 | GTGGACCTGCCTGTTGTGTTAATTGCCGACAAACTCGC | 160 | |
| | leprae (use this | | CCAATCAACCGTGGCTGCCCTGGGAGACCAAGTCGAGG | | |
| | to clone M. | | TGCGGTGGGTGGACGGTCCAGACCGGACGAAGCTGTTA | | |
| | smegmatis | | GCTGCAGTACCCGAGGCCGACGCGTTGTTGGTGCGGTC | | |
| | gene) | | GGCCACTACTGTCGACGCCGAGGTGCTGGCAGCCGCTC | | |
| | | | CTAAGCTCAAGATCGTCGCCCGTGCCGGGGTAGGGCTA | | |
| | | | GACAACGTTGATGTCGATGCCGCCACCGCGCGCGGTGT | | |
| | | | CCTGGTAGTCAACGCCCCAACGTCGAACATTCACAGCG | | |
| | | | CCGCTGAGCACGCGTTGGCGCTGCTATTGGCAGCTTCT | | |
| | | | CGGCAGATCGCGGAGGCCGACGCCTCACTGCGTGCACA | | |
| | | | CATCTGGAAACGGTCGTCGTTCTCCGGCACCGAAATTT | | |
| | | | TCGGCAAGACCGTCGGCGTGGTGGGGCTGGGTCGGATT | | |
| | | | GGGCAGTTGGTTGCCGCACGGATAGCAGCGTTCGGGGC | | |
| | | | TCACGTTATCGCTTACGACCCGTATGTGGCGCCGGCAC | | |
| | | | GGGCCGCGCAGCTTGGTATCGAGCTGATGTCTTTTGAC | | |
| | | | GATCTCCTAGCCCGGGCCGATTTTATCTCAGTGCATTT | | |
| | | | GCCGAAGACGCCCGAGACGGCGGGCCTGATCGACAAGG | | |
| | | | AGGCGCTGGCCAAAACCAAGCCCGGTGTCATCATTGTC | | |
| | | | AATGCCGCACGCGGCGGCTTAGTGGACGAGGTGGCGCT | | |
| | | | AGCCGATGCGGTGCGCAGCGGACATGTTCGGGCGGCCG | | |
| | | | GTCTAGATGTGTTTGCCACCGAACCGTGCACCGATAGC | | |
| | | | CCGCTGTTTGAACTATCGCAGGTGGTGGTGACACCGCA | | |
| | | | TCTGGGGGCGTCTACCGCCGAAGCCCAGGATCGAGCAG | | |
| | | | GTACTGATGTGGCCGAAAGCGTGCGGCTGGCGCTGGCG | | |
| | | | GGGGAGTTTGTGCCTGACGCGGTCAACGTGGACGGGGG | | |
| | | | CGTGGTCAACGAAGAGGTGGCTCCCTGGCTGGACTTGG | | |
| | | | TGTGCAAGCTTGGGGTGCTGGTAGCCGCGTTATCCGAT | | |
| | | | GAACTGCCGGCGTCGTTGTCGGTGCACGTGCGTGGCGA | | |
| | | | GTTGGCTTCTGAAGACGTTGAAATATTGCGGCTTTCGG | | |
| | | | CCCTACGTGGGCTTTTCTCGACGGTCATAGAGGATGCT | | |
| | | | GTGACGTTCGTCAACGCACCGGCACTGGCCGCCGAACG | | |
| | | | AGGTGTGTCCGCTGAAATCACTACGGGCTCGGAGAGCC | | |
| | | | CCAACCATCGCAGTGTGGTCGACGTGCGGGCGGTCGCC | | |
| | | | TCCGACGGCTCGGTGGTCAACATAGCCGGTACGTTGTC | | |
| | | | TGGGCCGCAACTGGTGCAGAAGATCGTGCAGGTCAATG | | |
| | | | GTCGTAACTTTGATTTGCGTGCGCAGGGCATGAACTTG | | |
| | | | GTGATCAGGTATGTCGACCAACCTGGCGCTCTGGGCAA | | |
| | | | GATTGGCACTTTGCTGGGCGCGGCCGGGGTGAATATCC | | |
| | | | AAGCTGCTCAGCTGTCTGAGGACACCGAGGGGCCAGGT | | |
| | | | GCGACGATTCTGTTGAGGCTGGATCAAGACGTGCCGGG | | |
| | | | TGATGTGCGGTCGGCGATCGTGGCAGCGGTGAGTGCCA | | |
| | | | ACAAGCTTGAGGTAGTCAATCTGTCATGA | | |
| serA | Thermobifida | NZ_AAAQ010 | GTGGCTGCGACCGCAGTCGAACCCACACGCACTCCCTC | 161 | |
| | fusca | 00025 | TAAGGAATTCGTTGTGCCCAAGCCAGTCGTCCTGGTCG | | |
| | | | CGGAAGAACTTTCGCCCGCAGGAATCGCGCTGTTGGAA | | |
| | | | GAGGACTTTGAAGTCCGCCACGTCAACGGCGCCGACCG | | |
| | | | TTCCCAGCTCCTTCCCGCGCTCGCCGGAGTCGACGCGC | | |
| | | | TGATCGTGCGCAGCGCCACCAAAGTGGACGCTGAGGTG | | |
| | | | CTGGCCGCGGCGCCCTCCCTCAAGGTTGTGGCGCGTGC | | |
| | | | GGGCGTCGGACTGGACAACGTGGATGTCGAGGCCGCCA | | |
| | | | CCAAGGCGGGCGTGCTCGTCGTCAACGCGCCCACCTCC | | |
| | | | AACATCATCAGTGCAGCGGAACAGGCCATCAACCTGCT | | |
| | | | CTTGGCCACGGCCCGCAACACTGCTGCTGCCCACGCGG | | |
| | | | CCCTCGTGCGCGGCGAGTGGAAGCGTTCCAAGTACACC | | |
| | | | GGCGTCGAACTGTACGACAAAACCGTCGGCATCGTGGG | | |
| | | | CCTGGGACGGATCGGCGTGCTCGTCGCCCAGCGGCTCC | | |
| | | | AGGCGTTCGGCACCAAGCTGATCGCCTACGACCCCTTC | | |
| | | | GTGCAGCCTGCCCGGGCCGCGCAGCTGGGGGTGGAGCT | | |
| | | | CGTCGAGCTCGACGAGCTGCTGGAGCGCAGCGACTTCA | | |
| | | | TCACGATCCACCTGCCCAAGACGAAGGACACGATCGGC | | |
| | | | CTGATCGGCGAGGAAGAGCTGCGCAAGGTCAAGCCGAC | | |
| | | | GGTCCGGATCATCAACGCTGCGCGCGGCGGGATCGTGG | | |
| | | | ACGAGACGGCCCTCTACCACGCGCTCAAGGAAGGTCGT | | |
| | | | GTGGCCGGCGCTGGGCTGGACGTGTTCGCCAAGGAGCC | | |
| | | | TTGCACGGACAGCCCGCTGTTCGAGCTGGAGAACGTGG | | |
| | | | TGGTGGCTCCGCACCTGGGGGCCAGCACGCACGAGGCG | | |
| | | | CAGGAGAAGGCCGGGACCCAGGTGGCCCGGTCCGTCAA | | |
| | | | GCTTGCGCTCGCCGGCGAGTTCGTGCCGGACGCGGTCA | | |
| | | | ACATCCAGGGCAAGGGCGTGGCCGAGGACATCAAGCCG | | |
| | | | GGGCTGCCGCTGACGGAGAAGCTCGGCCGTATCCTCGC | | |
| | | | CGCGCTCGCCGACGGTGCGATCACCCGGGTCGAGGTGG | | |
| | | | AGGTCCGGGGCGAGATCGTCGCCCACGACGTCAAGGTG | | |
| | | | ATCGAGCTGGCCGCGCTCAAGGGCCTCTTCACGGACAT | | |
| | | | CGTGGAAGAGGCTGTGACCTACGTGAACGCGCCTCTGG | | |
| | | | TAGCCAAGGAGCGCGGTATCGAGGTGAGCCTGACCACC | | |
| | | | GAGGAGGAGAGCCCCGACTGGCGCAACGTCATCACGGT | | |
| | | | GCGGGCCATCCTCTCCGACGGCCAGCGCGTGTCGGTCT | | |
| | | | CGGGCACGCTGACCGGGCCGCGCCAGTTGGAGAAGCTT | | |
| | | | GTCGAGGTCAACGGCTACACCATGGAGATCGCGCCCAG | | |
| | | | CGAGCACATGGCGTTCTTCTCCTACCACGACCGTCCCG | | |
| | | | GTGTGGTCGGCGTAGTCGGCCAACTGCTCGGACAGGCG | | |
| | | | CAGGTGAACATCGCCGGCATGCAGGTCAGCCGGGACAA | | |
| | | | GGAGGGCGGTGCGGCGCTGATCGCGCTGACCGTGGACT | | |
| | | | CGGCGATCCCCGACGAGACCCTCGAGACGATCTCCAAG | | |
| | | | GAGATCGGCGCCGAGATCAGCCGCGTGGACTTGGTTGA | | |
| | | | CTGA | | |
| serA | Streptomyces | AL939124 | GTGAGCTCGAAACCCGTCGTACTCATCGCTGAAGAGCT | 162 | |
| | coelicolor | | GTCGCCCGCGACCGTGGACGCACTCGGCCCCGACTTCG | | |
| | | | AGATCCGCCACTGCAACGGCGCGGACCGGGCCGAACTG | | |
| | | | CTCCCCGCCATCGCCGACGTGGACGCGATCCTGGTCCG | | |
| | | | CTCCGCGACCAAGGTCGACGCCGAGGCCGTGGCCGCCG | | |
| | | | CCAAGAAGCTCAAGGTCGTCGCGCGCGCCGGGGTCGGC | | |
| | | | CTGGACAACGTCGACGTCTCCGCCGCCACCAAGGCCGG | | |
| | | | CGTGATGGTGGTCAACGCCCCGACCTCCAACATCGTCA | | |
| | | | CCGCCGCCGAGCTGGCCTGCGGCCTGATCGTCGCCACC | | |
| | | | GCCCGCAACATCCCGCAGGCCAACGCCGCGCTGAAGAA | | |
| | | | CGGCGAGTGGAAGCGCAGCAAGTACACCGGCGTGGAGC | | |
| | | | TGGCCGAGAAGACCCTCGGCGTCGTCGGCCTCGGCCGC | | |
| | | | ATCGGCGCGCTCGTCGCGCAGCGCATGTCGGCCTTCGG | | |
| | | | CATGAAGGTCGTCGCCTACGACCCCTACGTGCAGCCCG | | |
| | | | CGCGGGCCGCGCAGATGGGCGTCAAGGTGCTGTCCCTG | | |
| | | | GACGAGCTGCTGGAGGTCTCCGACTTCATCACGGTCCA | | |
| | | | CCTGCCCAAGACCCCCGAGACCCTCGGCCTGATCGGCG | | |
| | | | ACGAGGCGCTGCGCAAGGTCAAGCCGAGCGTCCGCATC | | |
| | | | GTCAACGCCGCGCGCGGCGGCATCGTCGACGAGGAGGC | | |
| | | | GCTGTACTCGGCGCTCAAGGAGGGCCGCGTCGCCGGCG | | |
| | | | CCGGCCTCGACGTGTACGCCAAGGAGCCCTGCACCGAC | | |
| | | | TCGCCGCTGTTCGAGTTCGACCAGGTGGTCGCCACCCC | | |
| | | | GCACCTCGGCGCCTCCACCGACGAGGCCCAGGAGAAGG | | |
| | | | CCGGCATCGCCGTCGCCAAGTCGGTCCGCCTGGCCCTC | | |
| | | | GCCGGTGAGCTGGTCCCCGACGCGGTCAACGTCCAGGG | | |
| | | | CGGTGTCATCGCCGAGGACGTCAAGCCCGGTCTGCCGC | | |
| | | | TCGCCGAGCGCCTCGGCCGCATCTTCACCGCGCTCGCG | | |
| | | | GGTGAGGTCGCCGTCCGCCTCGACGTCGAGGTCTACGG | | |
| | | | CGAGATCACCCAGCACGACGTGAAGGTGCTGGAGCTGT | | |
| | | | CCGCCCTCAAGGGCGTCTTCGAGGACGTCGTCGACGAG | | |
| | | | ACGGTGTCGTACGTCAACGCCCCGCTGTTCGCCCAGGA | | |
| | | | GCGCGGCGTCGAGGTCCGGCTGACCACCAGCTCGGAGT | | |
| | | | CCCCGGAGCACCGCAACGTCGTCATCGTGCGCGGCACC | | |
| | | | CTCTCGGACGGCGAGGAGGTGTCGGTCTCCGGCACGCT | | |
| | | | GGCCGGCCCGAAGCACCTCCAGAAGATCGTCGCCATCG | | |
| | | | GCGAGTACGACGTGGACCTCGCCCTCGCCGACCACATG | | |
| | | | GTCGTCCTGCGCTACGAGGACCGTCCCGGCGTCGTCGG | | |
| | | | CACCGTCGGCCGGATCATCGGCGAGGCGGGTCTCAACA | | |
| | | | TCGCCGGCATGCAGGTCGCCCGCGCGACGGTCGGCGGC | | |
| | | | GAGGCGCTGGCCGTCCTCACCGTCGACGACACGGTGCC | | |
| | | | CTCCGGGGTTCTGGCGGAGGTCGCGGCGGAGATCGGCG | | |
| | | | CCACGTCCGCCCGGTCCGTCAACCTCGTCTGA | | |
| serA | Lactobacillus | AL935254 | ATGACAAAAGTCTTTATTGCTGGTCAGCTTCCAGCCCA | 163 | |
| | plantarum | | AGCTAATACGTTACTTTTACAAAGTCAGTTAGTCATTG | | |
| | | | ATACTTATACCGGCGATAACCTGATCAGTCACGCGGAA | | |
| | | | CTCATCCGTCGAGTCGCTGATGCCGACTTTTTGATTAT | | |
| | | | CCCACTCTCAACTCAAGTAGATCAAGATGTCTTAGACC | | |
| | | | ACGCCCCACACCTTAAACTGATTGCTAATTTTGGTGCT | | |
| | | | GGCACTAATAACATCGATATCGCGGCAGCAGCTAAGCG | | |
| | | | CCAGATTCCAGTCACGAACACGCCAAACGTTTCGGCGG | | |
| | | | TCGCAACCGCTGAATCAACGGTCGGTTTGATTATCAGC | | |
| | | | CTAGCGCATCGTATCGTGGAAGGCGATCACTTAATGCG | | |
| | | | AACTAGCGGCTTTAACGGTTGGGCGCCACTATTCTTTC | | |
| | | | TCGGCCACAACTTACAAGGCAAGACACTCGGCATCTTA | | |
| | | | GGCCTTGGCCAAATTGGTCAAGCCGTTGCCAAACGATT | | |
| | | | ACACGCCTTTGACATGCCCATCTTATACAGCCAACACC | | |
| | | | ACCGCCTACCGATTAGCCGTGAAACGCAACTTGGCGCA | | |
| | | | ACCTTTGTCTCCCAGGATGAACTTTTACAGCGTGCCGA | | |
| | | | CATCGTCACTTTACACCTGCCGCTTACCACACAAACAA | | |
| | | | CCCATCTAATCGATAACGCTGCTTTTAGCAAAATGAAG | | |
| | | | TCCACGGCGCTCCTCATCAACGCCGCACGGGGGCCAAT | | |
| | | | TGTCGACGAGCAAGCACTTGTGACGGCGCTGCAACAAC | | |
| | | | ATCAAATTGCTGGCGCTGCACTCGACGTCTACGAACAT | | |
| | | | GAACCGCAAGTCACACCTGGTTTGGCCACGATGAACAA | | |
| | | | CGTCATTTTGACACCTCATCTTGGCAACGCAACGGTCG | | |
| | | | AAGCTCGCGATGGCATGGCTACCATTGTCGCGGAGAAT | | |
| | | | GTGATTGCGATGGCCCAACATCAGCCAATCAAGTACGT | | |
| | | | GGTTAACGACGTAACACCAGCATAG | | |
| serA | Coryne- | AP005278 | GTGCGTTCTGCTACCACTGTCGATGCTGAAGTCATCGC | 270 | |
| | bacterium | | CGCTGCCCCTAACTTGAAGATCGTCGGTCGTGCCGGCG | | |
| | glutamicum | | TGGGCTTGGACAACGTTGACATCCCTGCTGCCACTGAA | | |
| | | | GCTGGCGTCATGGTTGCTAACGCACCGACCTCTAATAT | | |
| | | | TCACTCCGCTTGTGAGCACGCAATTTCTTTGCTGCTGT | | |
| | | | CTACTGCTCGCCAGATCCCTGCTGCTGATGCGACGCTG | | |
| | | | CGTGAGGGCGAGTGGAAGCGGTCTTCTTTCAACGGTGT | | |
| | | | GGAAATTTTCGGAAAAACTGTCGGTATCGTCGGTTTTG | | |
| | | | GCCACATTGGTCAGTTGTTTGCTCAGCGTCTTGCTGCG | | |
| | | | TTTGAGACCACCATTGTTGCTTACGATCCTTACGCTAA | | |
| | | | CCCTGCTCGTGCGGCTCAGCTGAACGTTGAGTTGGTTG | | |
| | | | AGTTGGATGAGCTGATGAGCCGTTCTGACTTTGTCACC | | |
| | | | ATTCACCTTCCTAAGACCAAGGAAACTGCTGGCATGTT | | |
| | | | TGATGCGCAGCTCCTTGCTAAGTCCAAGAAGGGCCAGA | | |
| | | | TCATCATCAACGCTGCTCGTGGTGGCCTTGTTGATGAG | | |
| | | | CAGGCTTTGGCTGATGCGATTGAGTCCGGTCACATTCG | | |
| | | | TGGCGCTGGTTTCGATGTGTACTCCACCGAGCCTTGCA | | |
| | | | CTGATTCTCCTTTGTTCAAGTTGCCTCAGGTTGTTGTG | | |
| | | | ACTCCTCACTTGGGTGCTTCTACTGAAGAGGCTCAGGA | | |
| | | | TCGTGCGGGTACTGACGTTGCTGATTCTGTGCTCAAGG | | |
| | | | CGCTGGCTGGCGAGTTCGTGGCGGATGCTGTGAACGTT | | |
| | | | TCCGGTGGTCGCGTGGGCGAAGAGGTTGCTGTGTGGAT | | |
| | | | GGATCTGGCTCGCAAGCTTGGTCTTCTTGCTGGCAAGC | | |
| | | | TTGTCGACGCCGCCCCAGTCTCCATTGAGGTTGAGGCT | | |
| | | | CGAGGCGAGCTTTCTTCCGAGCAGGTCGATGCACTTGG | | |
| | | | TTTGTCCGCTGTTCGTGGTTTGTTCTCCGGAATTATCG | | |
| | | | AAGAGTCCGTTACTTTCGTCAACGCTCCTCGCATTGCT | | |
| | | | GAAGAGCGTGGCCTGGACATCTCCGTGAAGACCAACTC | | |
| | | | TGAGTCTGTTACTCACCGTTCCGTCCTGCAGGTCAAGG | | |
| | | | TCATTACTGGCAGCGGCGCGAGCGCAACTGTTGTTGGT | | |
| | | | GCCCTGACTGGTCTTGAGCGCGTTGAGAAGATCACCCG | | |
| | | | CATCAATGGCCGTGGCCTGGATCTGCGCGCAGAGGGTC | | |
| | | | TGAACCTCTTCCTGCAGTACACTGACGCTCCTGGTGCA | | |
| | | | CTGGGTACCGTTGGTACCAAGCTGGGTGCTGCTGGCAT | | |
| | | | CAACATCGAGGCTGCTGCGTTGACTCAGGCTGAGAAGG | | |
| | | | GTGACGGCGCTGTCCTGATCCTGCGTGTTGAGTCCGCT | | |
| | | | GTCTCTGAAGAGCTGGAAGCTGAAATCAACGCTGAGTT | | |
| | | | GGGTGCTACTTCCTTCCAGGTTGATCTTGAC | | |
| serA | Escherichia coli | NC_000913 | ATGGCAAAGGTATCGCTGGAGAAAGACAAGATTAAGTT | 271 | |
| | | | TCTGCTGGTAGAAGGCGTGCACCAAAAGGCGCTGGAAA | | |
| | | | GCCTTCGTGCAGCTGGTTACACCAACATCGAATTTCAC | | |
| | | | AAAGGCGCGCTGGATGATGAACAATTAAAAGAATCCAT | | |
| | | | CCGCGATGCCCACTTCATCGGCCTGCGATCCCGTACCC | | |
| | | | ATCTGACTGAAGACGTGATCAACGCCGCAGAAAAACTG | | |
| | | | GTCGCTATTGGCTGTTTCTGTATCGGAACAAACCAGGT | | |
| | | | TGATCTGGATGCGGCGGCAAAGCGCGGGATCCCGGTAT | | |
| | | | TTAACGCACCGTTCTCAAATACGCGCTCTGTTGCGGAG | | |
| | | | CTGGTGATTGGCGAACTGCTGCTGCTATTGCGCGGCGT | | |
| | | | GCCGGAAGCCAATGCTAAAGCGCACCGTGGCGTGTGGA | | |
| | | | ACAAACTGGCGGCGGGTTCTTTTGAAGCGCGCGGCAAA | | |
| | | | AAGCTGGGTATCATCGGCTACGGTCATATTGGTACGCA | | |
| | | | ATTGGGCATTCTGGCTGAATCGCTGGGAATGTATGTTT | | |
| | | | ACTTTTATGATATTGAAAATAAACTGCCGCTGGGCAAC | | |
| | | | GCCACTCAGGTACAGCATCTTTCTGACCTGCTGAATAT | | |
| | | | GAGCGATGTGGTGAGTCTGCATGTACCAGAGAATCCGT | | |
| | | | CCACCAAAAATATGATGGGCGCGAAAGAAATTTCACTA | | |
| | | | ATGAAGCCCGGCTCGCTGCTGATTAATGCTTCGCGCGG | | |
| | | | TACTGTGGTGGATATTCCGGCGCTGTGTGATGCGCTGG | | |
| | | | CGAGCAAACATCTGGCGGGGGCGGCAATCGACGTATTC | | |
| | | | CCGACGGAACCGGCGACCAATAGCGATCCATTTACCTC | | |
| | | | TCCGCTGTGTGAATTCGACAACGTCCTTCTGACGCCAC | | |
| | | | ACATTGGCGGTTCGACTCAGGAAGCGCAGGAGAATATC | | |
| | | | GGCCTGGAAGTTGCGGGTAAATTGATCAAGTATTCTGA | | |
| | | | CAATGGCTCAACGCTCTCTGCGGTGAACTTCCcGGAAG | | |
| | | | TCTCGCTGCCACTGCACGGTGGGCGTCGTCTGATGCAC | | |
| | | | ATCCACGAAAACCGTCCGGGCGTGCTAACTGCGCTGAA | | |
| | | | CAAAATCTTCGCCGAGCAGGGCGTCAACATCGCCGCGC | | |
| | | | AATATCTGCAAACTTCCGCCCAGATGGGTTATGTGGTT | | |
| | | | ATTGATATTGAAGCCGACGAAGACGTTGCCGAAAAAGC | | |
| | | | GCTGCAGGCAATGAAAGCTATTCCGGGTACCATTCGCG | | |
| | | | CCCGTCTGCTGTAC | | |
| lysE | Mycobacterium | Z74025 | GTGAACTCACCACTGGTCGTCGGCTTCCTGGCCTGCTT | 164 | |
| | tuberculosis | | CACGCTGATCGCCGCGATTGGCGCGCAGAACGCATTCG | | |
| | (use this to | | TGCTGCGGCAGGGAATCCAGCGTGAGCACGTGCTGCCG | | |
| | clone M. | | GTGGTGGCGCTGTGCACGGTGTCCGACATCGTGCTGAT | | |
| | smegmatis | | CGCCGCCGGTATCGCGGGGTTCGGCGCATTGATCGGCG | | |
| | gene) | | CACATCCGCGTGCGCTCAATGTCGTCAAGTTTGGCGGC | | |
| | | | GCCGCCTTCCTAATCGGCTACGGGCTACTTGCGGCCCG | | |
| | | | GCGGGCGTGGCGACCTGTTGCGCTGATCCCATCTGGCG | | |
| | | | CCACGCCGGTTCGCTTAGCCGAGGTCCTGGTGACCTGT | | |
| | | | GCGGCATTCACGTTCCTCAACCCACACGTCTACCTCGA | | |
| | | | CACCGTCGTGTTGCTAGGCGCGCTGGCCAACGAGCACA | | |
| | | | GCGACCAGCGCTGGCTGTTCGGCCTCGGCGCGGTCACA | | |
| | | | GCCAGTGCGGTATGGTTCGCCACCCTCGGGTTCGGAGC | | |
| | | | CGGCCGGTTGCGCGGGCTGTTCACCAACCCCGGCTCGT | | |
| | | | GGAGAATCCTCGACGGCCTGATCGCGGTCATGATGGTT | | |
| | | | GCGCTGGGAATCTCGCTGACCGTGACCTAG | | |
| lysE | Mycobacterium | Z77162 | ATGATGACGCTCAAGGTCGCGATCGGCCCGCAAAACGC | 165 | |
| | tuberculosis | | ATTTGTCCTGCGCCAAGGAATTAGGCGAGAATACGTGC | | |
| | (use this to | | TGGTCATTGTGGCGCTGTGCGGGATCGCTGATGGGGCA | | |
| | clone M. | | CTGATTGCCGCGGGCGTTGGCGGCTTCGCTGCGCTGAT | | |
| | smegmatis | | TCACGCTCATCCCAATATGACTTTGGTTGCCCGATTTG | | |
| | gene) | | GCGGCGCAGCGTTCTTGATTGGCTACGCGCTATTGGCC | | |
| | | | GCGCGGAACGCGTGGCGCCCGAGCGGGCTGGTGCCGTC | | |
| | | | GGAATCGGGGCCGGCTGCGCTGATCGGCGTGGTGCAAA | | |
| | | | TGTGCCTGGTGGTGACCTTTCTCAACCCACACGTCTAT | | |
| | | | CTGGACACTGTGGTGTTGATCGGTGCCCTCGCCAATGA | | |
| | | | GGAATCAGATCTGCGGTGGTTTTTCGGAGCCGGTGCCT | | |
| | | | GGGCCGCCAGCGTCGTATGGTTCGCCGTGTTGGGATTT | | |
| | | | AGCGCGGGCCGGCTACAGCCATTCTTCGCAACTCCAGC | | |
| | | | TGCTTGGCGCATTCTTGATGCGCTGGTTGCCGTGACGA | | |
| | | | TGATTGGGGTCGCCGTCGTTGTGCTCGTCACGTCACCA | | |
| | | | AGTGTGCCGACGGCCAATGTCGCACTGATCATTTGA | | |
| lysE | Streptomyces | AL939131 | ATGAACAACGCCCTCACGGCGGCCGCCGCCGGTTTCGG | 166 | |
| | coelicolor | | CACCGGCCTCTCGCTCATCGTCGCCATCGGCGCCCAGA | | |
| | | | ACGCCTTCGTCCTGCGGCAGGGGGTCCGCCGTGACGCG | | |
| | | | GTGCTCGCCGTGGTCGGCATCTGCGCGCTGTCCGACGC | | |
| | | | CGTGCTCATCGCCCTGGGCGTCGGCGGGGTCGGCGCCG | | |
| | | | TGGTGGTGGCGTGGCCGGGCGCGCTGACCGCCGTCGGC | | |
| | | | TGGATCGGCGGCGCGTTCCTGCTCTGCTACGGAGCCCT | | |
| | | | GGCGGCCCGGCGGGTGTTCCGGCCGTCCGGGGCGCTGC | | |
| | | | GGGCGGACGGCGCCGCCGCGGGCTCGCGCCGCCGGGCC | | |
| | | | GTGCTCACCTGCCTGGCGCTGACCTGGCTCAACCCGCA | | |
| | | | CGTCTACCTCGACACCGTGTTCCTGCTGGGCTCCGTCG | | |
| | | | CCGCCGACCGGGGGCCGCTGCGCTGGACCTTCGGCCTC | | |
| | | | GGAGCCGCCGCCGCCAGCCTGGTCTGGTTCGCCGCGCT | | |
| | | | CGGCTTCGGCGCCCGCTACCTCGGCCGCTTCCTGTCCC | | |
| | | | GGCCCGTCGCCTGGCGGGTCCTCGACGGACTGGTGGCC | | |
| | | | GCCACCATGATCGTCCTCGGCGTCTCCCTCGTCGCCGG | | |
| | | | GGCCTGA | | |
| lysE | Lactobacillus | AL935256 | ATGCAAGTGTTTTTACAAGGATTATTATTTGGAATTGT | 167 | |
| | plantarum | | TTACATTGCACCAATCGGGATGCAAAACTTATTTGTGG | | |
| | | | TTTCGACAGCTATTGAACAACCATTGCAACGGGCATTG | | |
| | | | CGGGTGGCTTTAATTGTAATTGCGTTCGATACGTCGCT | | |
| | | | CTCCCTGGCTTGCTTTTATGGGGTGGGCCGATTGTTGC | | |
| | | | AGACCACTCCCTGGCTCGAATTAGGGGTGTTGTTGATT | | |
| | | | GGGAGTTTATTGGTCTTTTACATTGGCTGGAATCTGTT | | |
| | | | GCGGAAAAAGGCCACGGCAATGGGGACCCTCGACGCGG | | |
| | | | ACTTTTCATATAAAGCAGCGATTCTGACAGCTTTTTCG | | |
| | | | GTAGCATGGCTGAATCCGCAAGCACTGATTGATGGTTC | | |
| | | | CGTGTTGTTGGCGGCGTTTCGGGTGTCAATCCCGGCGG | | |
| | | | CACTGACCCATTTCTTTATGTTGGGGGTCATCCTAGCA | | |
| | | | TCCATTATTTGGTTCATCGGTCTGACCAGCTTGATCAG | | |
| | | | TAAGTTTAAACATCTCATGCAACCACGAGTCCTACTCT | | |
| | | | GGATCAATCGAATCTGTGGTGGCATCATTATTCTATAC | | |
| | | | GGCGTGCAGTTGCTAGCAACCTTCATCACGAAAATATAG | | |
| lysE | Coryne- | X96471 | ATGGAAATCTTCATTACAGGTCTGCTTTTGGGGGCCAG | 272 | |
| | bacterium | | TCTTTTACTGTCCATCGGACCGCAGAATGTACTGGTGA | | |
| | glutamicum | | TTAAACAAGGAATTAAGCGCGAAGGACTCATTGCGGTT | | |
| | | | CTTCTCGTGTGTTTAATTTCTGACGTCTTTTTGTTCAT | | |
| | | | CGCCGGCACCTTGGGCGTTGATCTTTTGTCCAATGCCG | | |
| | | | CGCCGATCGTGCTCGATATTATGCGCTGGGGTGGCATC | | |
| | | | GCTTACCTGTTATGGTTTGCCGTCATGGCAGCGAAAGA | | |
| | | | CGCCATGACAAACAAGGTGGAAGCGCCACAGATCATTG | | |
| | | | AAGAAACAGAACCAACCGTGCCCGATGACACGCCTTTG | | |
| | | | GGCGGTTCGGCGGTGGCCACTGACACGCGCAACCGGGT | | |
| | | | GCGGGTGGAGGTGAGCGTCGATAAGCAGCGGGTTTGGG | | |
| | | | TAAAGCCCATGTTGATGGCAATCGTGCTGACCTGGTTG | | |
| | | | AACCCGAATGCGTATTTGGACGCGTTTGTGTTTATCGG | | |
| | | | CGGCGTCGGCGCGCAATACGGCGACACCGGACGGTGGA | | |
| | | | TTTTCGCCGCTGGCGCGTTCGCGGCAAGCCTGATCTGG | | |
| | | | TTCCCGCTGGTGGGTTTCGGCGCAGCAGCATTGTCACG | | |
| | | | CCCGCTGTCCAGCCCCAAGGTGTGGCGCTGGATCAACG | | |
| | | | TCGTCGTGGCAGTTGTGATGACCGCATTGGCCATCAAA | | |
| | | | CTGATGTTGATGGGTTAG | | |
| metB | Mycobacterium | AL021897 | ATGAGCGAAGACCGCACGGGACACCAGGGAATCAGCGG | 168 | |
| | tuberculosis | | ACCGGCCACCCGCGCCATCCACGCTGGCTACCGCCCGG | | |
| | (use this to | | ATCCGGCGACCGGGGCGGTGAACGTGCCGATCTACGCC | | |
| | clone M. | | AGCAGCACCTTCGCCCAAGACGGCGTCGGCGGTCTGCG | | |
| | smegmatis | | TGGCGGTTTCGAATACGCACGCACCGGCAACCCCACCC | | |
| | gene) | | GGGCCGCATTGGAGGCCTCGCTGGCGGCAGTCGAGGAG | | |
| | | | GGTGCTTTCGCGCGGGCATTCAGTTCCGGGATGGCCGC | | |
| | | | GACCGACTGCGCCCTGCGGGCGATGTTACGGCCCGGAG | | |
| | | | ACCACGTCGTCATTCCCGATGACGCCTACGGCGGCACA | | |
| | | | TTCCGGTTGATAGACAAGGTGTTCACCCGGTGGGATGT | | |
| | | | CCAGTACACGCCGGTGCGGCTTGCCGATCTGGATGCGG | | |
| | | | TGGGTGCCGCGATTACTCCGCGCACCCGGCTGATTTGG | | |
| | | | GTGGAGACGCCCACCAATCCGCTACTGTCGATCGCCGA | | |
| | | | TATCACGGCCATTGCCGAGCTGGGCACAGACAGATCGG | | |
| | | | CAAAAGTATTGGTGGACAATACCTTTGCCTCACCCGCG | | |
| | | | TTGCAGCAGCCGTTGCGGCTGGGCGCCGATGTGGTGTT | | |
| | | | GCACTCGACTACCAAGTACATCGGCGGCCATTCCGACG | | |
| | | | TGGTGGGAGGTGCGCTGGTCACCAACGACGAAGAGCTG | | |
| | | | GACGAGGAGTTCGCTTTCTTGCAGAACGGCGCCGGCGC | | |
| | | | GGTGCCCGGACCATTCGACGCCTACCTGACCATGCGCG | | |
| | | | GCCTGAAGACCTTGGTGCTGCGGATGCAGCGGCACAGT | | |
| | | | GAAAATGCCTGTGCGGTAGCGGAATTCCTCGCTGATCA | | |
| | | | TCCGTCGGTGAGTTCTGTGTTGTATCCGGGTTTGCCCA | | |
| | | | GTCATCCCGGGCATGAGATTGCCGCGCGACAGATGCGC | | |
| | | | GGCTTCGGCGGCATGGTTTCGGTGCGGATGCGGGCCGG | | |
| | | | TCGGCGTGCGGCGCAGGACCTGTGTGCCAAGACCCGCG | | |
| | | | TCTTCATCCTGGCCGAGTCGCTGGGTGGGGTGGAGTCG | | |
| | | | CTGATCGAACATCCCAGCGCCATGACCCATGCGTCGAC | | |
| | | | GGCCGGTTCGCAATTGGAGGTGCCCGACGATCTGGTGC | | |
| | | | GGCTTTCGGTCGGTATCGAAGACATTGCCGACCTGCTC | | |
| | | | GGCGATCTCGAACAGGCCCTGGGTTAA | | |
| metB | Mycobacterium | U15183 | ATGAGCGAAGATTACCGGGGACACCACGGCATTACCGG | 169 | |
| | leprae (use this | | ACTAGCCACCAAAGCCATCCATGCTGGCTATCGTCCGG | | |
| | to clone M. | | ATCCGGCAACAGGGGCAGTGAATGTCCCGATTTATGCC | | |
| | smegmatis | | AGTAGTACTTTTGCCCAAGATGGCGTCGGTGAGTTGCG | | |
| | gene) | | TGGCGGATTCGAATACGCGCGTACCGGCAACCCCATGC | | |
| | | | GCGCCGCTTTAGAGGCATCCTTGGCCACGGTCGAAGAG | | |
| | | | GGCGTTTTTGCGCGAGCCTTCAGTTCCGGAATGGCTGC | | |
| | | | TAGCGACTGTGCCTTGCGGGTCATGCTGCGGCCGGGGG | | |
| | | | ACCACGTGATCATCCCGGATGACGTCTACGGCGGCACC | | |
| | | | TTCCGGCTGATAGACAAGGTCTTTACTCAATGGAACGT | | |
| | | | TGACTACACGCCGGTACCGCTGTCTGATTTGGACGCGG | | |
| | | | TCCGCGCCGCGATCACATCACGGACCCGGCTGATATGG | | |
| | | | GTGGAAACACCGACCAATCCGCTGCTGTCCATCGCAGA | | |
| | | | TATCACCAGCATCGGCGAACTAGGCAAAAAGCACTCAG | | |
| | | | TAAAGGTGTTGGTGGACAACACCTTTGCTTCACCCGCG | | |
| | | | CTGCAACAGCCGCTGATGCTGGGGGCAGACGTCGTGTT | | |
| | | | GCACTCGACCACAAAGTACATCGGCGGCCACTCTGATG | | |
| | | | TGGTGGGCGGCGCGCTAGTCACCAACGACGAAGAGCTG | | |
| | | | GACCAGGCTTTCGGCTTCTTGCAGAACGGAGCCGGTGC | | |
| | | | GGTGCCGAGCCCGTTCGACGCGTACCTAACGATGCGCG | | |
| | | | GATTGAAGACTTTAGTGCTGCGGATGCAGCGGCACAAC | | |
| | | | GAAAATGCCATTACTGTAGCGGAATTCCTGGCTGGGCA | | |
| | | | TCCGTCGGTGAGCGCCGTGCTGTATCCGGGCTTGCCCA | | |
| | | | GCCATCCCGGGCATGAGGTCGCTGCACGGCAGATGCGC | | |
| | | | GGCTTCGGCGGCATGGTTTCGTTGCGGATGCGAGCCGG | | |
| | | | CCGACTAGCCGCCCAGGATCTGTGTGCCCGCACCAAGG | | |
| | | | TGTTTACCTTGGCTGAATCCTTGGGTGGAGTGGAGTCG | | |
| | | | CTGATTGAGCAGCCCAGTGCCATGACGCACGCGTCGAC | | |
| | | | AACCGGGTCGCAATTGGAAGTACCCGACGACCTGGTGC | | |
| | | | GGCTTTCGGTCGGTATTGAAGACGTCGGCGACCTGCTG | | |
| | | | TGCGACCTCAAGCAGGCGTTAAACTAA | | |
| metB | Streptomyces | AL939122 | GTGCCCATGAGCGACAGGCACATCAGTCAGCACTTCGA | 170 | |
| | coelicolor | | GACGCTCGCGATCCACGCGGGCAACACCGCCGATCCCC | | |
| | | | TGACGGGCGCGGTCGTCCCGCCGATCTATCAGGTGTCG | | |
| | | | ACCTACAAGCAGGACGGCGTCGGCGGATTGCGCGGCGG | | |
| | | | CTACGAGTACAGCCGCAGCGCCAACCCGACCCGTACCG | | |
| | | | CGCTGGAGGAGAACCTCGCCGCCCTGGAGGGCGGCCGC | | |
| | | | CGCGGCCTCGCGTTCGCGTCCGGACTGGCGGCCGAGGA | | |
| | | | CTGCCTGTTGCGTACGCTGCTGCGCCCCGGCGACCACG | | |
| | | | TGGTGATCCCGAACGACGCGTACGGCGGCACCTTCCGC | | |
| | | | CTCTTCGCCAAGGTCGCCACCCGGTGGGGTGTGGAGTG | | |
| | | | GTCCGTGGCCGACACGAGCGACGCCGCCGCCGTGCGGG | | |
| | | | CCGCCCTCACCCCGAAGACCAAGGCGGTGTGGGTGGAG | | |
| | | | ACGCCCTCCAACCCGCTGCTCGGCATCACCGACATCGC | | |
| | | | GCAGGTCGCCCAGGTCGCCCGGGACGCCGGCGCCCGGC | | |
| | | | TCGTCGTCGACAACACCTTCGCCACCCCGTACCTCCAG | | |
| | | | CAGCCGCTGGCCCTCGGCGCCGACGTCGTCGTGCACTC | | |
| | | | GCTGACCAAGTACATGGGCGGGCACTCGGACGTCGTGG | | |
| | | | GCGGCGCGCTGATCGTGGGCGACCAGGAGCTGGGCGAG | | |
| | | | GAGCTGGCGTTCCACCAGAACGCGATGGGCGCGGTCGC | | |
| | | | CGGACCCTTCGACTCCTGGCTGGTGCTGCGCGGCACCA | | |
| | | | AGACCCTCGCCGTGCGCATGGACCGGCACAGCGAGAAC | | |
| | | | GCGACCAAGGTCGCCGACATGCTCTCCCGGCACGCGCG | | |
| | | | CGTGACGAGCGTGCTGTACCCGGGGCTGCCCGAGCACC | | |
| | | | CGGGGCACGAGGTCGCCGCCAAGCAGATGAAGGCGTTC | | |
| | | | GGCGGCATGGTGTCGTTCCGCGTCGAGGGCGGCGAGCA | | |
| | | | GGCCGCCGTCGAGGTGTGCAACCGCGCGAAGGTCTTCA | | |
| | | | CGCTCGGCGAGTCCCTCGGCGGCGTCGAGTCGCTGATC | | |
| | | | GAGCACCCGGGCCGGATGACGCACGCCTCCGCGGCGGG | | |
| | | | CTCGGCCCTGGAGGTGCCCGCCGACCTGGTGCGGCTGT | | |
| | | | CGGTCGGCATCGAGAACGCCGACGACCTGCTGGCCGAC | | |
| | | | CTCCAGCAGGCGCTGGGCTAG | | |
| metB | Thermobifida | NZ_AAAQ010 | ATGAGTTACGAGGGGTTTGAGACACTGGCCATCCACGC | 171 | |
| | fusca | 00041 | CGGTCAGGAGGCAGACGCCGAGACCGGGGCCGTGGTGG | | |
| | | | TCCCCATCTACCAGACGAGCACCTACCGCCAAGACGGG | | |
| | | | GTGGGCGGGCTGCGCGGCGGCTACGAGTACTCCCGCAC | | |
| | | | CGCCAACCCGACCCGCACGGCACTGGAAGAATGCCTGG | | |
| | | | CCGCGCTGGAAGGCGGGGTGCGGGGCCTGGCGTTCGCT | | |
| | | | TCCGGCATGGCCGCAGAGGACACCCTGCTCCGCACCAT | | |
| | | | CGCCCGACCCGGCGACCACCTCATCATCCCCAACGACG | | |
| | | | CCTACGGCGGCACGTTCCGCCTCGTCTCCAAGGTCTTC | | |
| | | | GAACGGTGGGGAGTGAGCTGGGACGCCGTCGACCTGTC | | |
| | | | CAACCCGGAGGCGGTGCGGACCGCAATCCGCCCGGAAA | | |
| | | | CCGTGGCGATCTGGGTGGAAACCCCCACCAACCCGCTG | | |
| | | | CTCAACATTGCGGACATCGCCGCGCTCGCGGACATCGC | | |
| | | | GCACGCCGCTGACGCGCTGCTGGTGGTCGACAACACCT | | |
| | | | TCGCCTCCCCGTACCTGCAGCGGCCGCTCAGCCTCGGT | | |
| | | | GCGGACGTGGTCGTGCACTCCACCACCAAATACCTGGG | | |
| | | | CGGCCACTCCGACGTGGTCGGCGGCGCCCTCGTGGTCG | | |
| | | | CCGACGCGGAACTGGGAGAGCGCCTCGCCTTCCACCAG | | |
| | | | AACTCGATGGGCGCGGTCGCGGGACCGTTCGACGCCTG | | |
| | | | GCTGACCCTGCGCGGCATCAAAACCCTCGGCGTGCGCA | | |
| | | | TGGACCGGCACTGCGCCAACGCGGAACGCGTCGTGGAA | | |
| | | | GCGCTCGTCGGCCACCCGGAAGTCGCCGAAGTGCTCTA | | |
| | | | CCCGGGCCTGTCCGACCACCCCGGCCACAAGGTGGCGG | | |
| | | | TCGACCAGATGCGCGCCTTCGGTGGCATGGTGTCGTTC | | |
| | | | CGCATGCGCGGCGGGGAGGAAGCCGCGTTGCGGGTGTG | | |
| | | | CGCGAAAACGAAAGTGTTCACCCTCGCTGAATCCTTGG | | |
| | | | GCGGGGTGGAGTCGCTGATCGAACACCCGGGGAAGATG | | |
| | | | ACCCACGCCTCCACCGCGGGCTCCCTCCTGGAAGTGCC | | |
| | | | CAGCGACCTGGTCCGGCTCTCCGTGGGTATCGAAACCG | | |
| | | | TCGACGACCTCGTCAACGACCTGCTCCAAGCATTGGAG | | |
| | | | CCGTAG | | |
| metB | Lactobacillus | AL935252 | ATGAAATTTGAAACCCAATTAATTCACGGTGGTATCAG | 172 | |
| | plantarum | | TGAGGATGCCACTACTGGCGCGACTTCGGTACCCATCT | | |
| | | | ACATGGCCTCGACCTTCCGCCAAACAAAAATCGGTCAA | | |
| | | | AATCAATACGAATATTCACGGACGGGAAATCCAACCCG | | |
| | | | GGCCGCCGTCGAAGCATTAATTGCCACCCTCGAACATG | | |
| | | | GCAGCGCTGGCTTCGCATTTGCTTCTGGCTCCGCTGCC | | |
| | | | ATTAATACCGTCTTCTCACTATTCTCGGCTGGTGATCA | | |
| | | | CATTATTGTGGGAAATGATGTCTACGGTGGCACCTTCC | | |
| | | | GCTTGATCGACGCCGTTTTGAAACACTTTGGCATGACT | | |
| | | | TTTACAGCCGTAGATACGCGTGACTTGGCCGCCGTTGA | | |
| | | | AGCCGCAATTACCCCCACAACTAAGGCGATTTATTTGG | | |
| | | | AAACACCGACGAACCCGTTATTACACATTACGGATATT | | |
| | | | GCTGCCATTGCGAAGCTCGCGCAAGCACACGATTTACT | | |
| | | | GAGTATCATCGACAACACCTTCGCCTCCCCATACGTCC | | |
| | | | AGAAGCCCCTGGATTTAGGCGTTGACATTGTTTTACAC | | |
| | | | AGTGCTTCCAAGTATCTCGGTGGTCACAGTGATGTTAT | | |
| | | | CGGTGGCTTGGTTGTCACCAAGACGCCAGCACTTGGCG | | |
| | | | AAAAAATCGGCTACTTGCAAAATGCCATCGGTAGTATT | | |
| | | | TTGGCCCCGCAAGAAAGCTGGCTATTACAACGTGGTAT | | |
| | | | GAAGACTCTGGCATTGCGCATGCAAGCCCACCTG~TA | | |
| | | | ATGCCGCTAAAATCTTTACTTACTTAAAGTCTCACCCA | | |
| | | | GCAGTTACTAAGATTTACTATCCAGGCGATCCTGATAA | | |
| | | | TCCCGATTTTTCGATTGCCAAGCAACAGATGAATGGCT | | |
| | | | TCGGCGCAATGATCTCGTTTGAATTACAACCAGGAATG | | |
| | | | AACCCCCAGACCTTCGTTGAACATTTACAAGTCATCAC | | |
| | | | GCTCGCCGAAAGTCTCGGAGCATTGGAAAGTTTAATTG | | |
| | | | AAATTCCAGCCTTAATGACTCACGGTGCCATCCCACGC | | |
| | | | ACAATTCGGCTACAGAATGGCATCAAAGACGAGCTGAT | | |
| | | | TCGCTTATCAGTCGGTGTTGAAGCCAGTGACGATTTGT | | |
| | | | TAGCAGACCTTGAGCGCGGGTTCGCTAGCATTCAGGCA | | |
| | | | GATTAA | | |
| metB | Coryne- | AF126953 | TTGTCTTTTGACCCAAACACCCAGGGTTTCTCCACTGC | 273 | |
| | bacterium | | ATCGATTCACGCTGGGTATGAGCCAGACGACTACTACG | | |
| | glutamicum | | GTTCGATTAACACCCCAATCTATGCCTCCACCACCTTC | | |
| | | | GCGCAGAACGCTCCAAACGAACTGCGCAAAGGCTACGA | | |
| | | | GTACACCCGTGTGGGCAACCCCACCATCGTGGCATTAG | | |
| | | | AGCAGACCGTCGCAGCACTCGAAGGCGCAAAGTATGGC | | |
| | | | CGCGCATTCTCCTCCGGCATGGCTGCAACCGACATCCT | | |
| | | | GTTCCGCATCATCCTCAAGCCGGGCGATCACATCGTCC | | |
| | | | TCGGCAACGATGCTTACGGCGGAACCTACCGCCTGATC | | |
| | | | GACACCGTATTCACCGCATGGGGCGTCGAATACACCGT | | |
| | | | TGTTGATACCTCCGTCGTGGAAGAGGTCAAGGCAGCGA | | |
| | | | TCAAGGACAACACCAAGCTGATCTGGGTGGAAACCCCA | | |
| | | | ACCAACCCAGCACTTGGCATCACCGACATCGAAGCAGT | | |
| | | | AGCAAAGCTCACCGAAGGCACCAACGCCAAGCTGGTTG | | |
| | | | TTGACAACACCTTCGCATCCCCATACCTGCAGCAGCCA | | |
| | | | CTAAAACTCGGCGCACACGCAGTCCTGCACTCCACCAC | | |
| | | | CAAGTACATCGGAGGACACTCCGACGTTGTTGGCGGCC | | |
| | | | TTGTGGTTACCAACGACCAGGAAATGGACGAAGAACTG | | |
| | | | CTGTTCATGCAGGGCGGCATCGGACCGATCCCATCAGT | | |
| | | | TTTCGATGCATACCTGACCGCCCGTGGCCTCAAGACCC | | |
| | | | TTGCAGTGCGCATGGATCGCCACTGCGACAACGCAGAA | | |
| | | | AAGATCGCGGAATTCCTGGACTCCCGCCCAGAGGTCTC | | |
| | | | CACCGTGCTCTACCCAGGTCTGAAGAACCACCCAGGCC | | |
| | | | ACGAAGTCGCAGCGAAGCAGATGAAGCGCTTCGGCGGC | | |
| | | | ATGATCTCCGTCCGTTTCGCAGGCGGCGAAGAAGCAGC | | |
| | | | TAAGAAGTTCTGTACCTCCACCAAACTGATCTGTCTGG | | |
| | | | CCGAGTCCCTCGGTGGCGTGGAATCCCTCCTGGAGCAC | | |
| | | | CCAGCAACCATGACCCACCAGTCAGCTGCCGGCTCTCA | | |
| | | | GCTCGAGGTTCCCCGCGACCTCGTGCGCATCTCCATTG | | |
| | | | GTATTGAAGACATTGAAGACCTGCTCGCAGATGTCGAG | | |
| | | | CAGGCCCTCAATAACCTTTAG | | |
| metB | Escherichia coli | NC_000913 | ATGACGCGTAAACAGGCCACCATCGCAGTGCGTAGCGG | 274 | |
| | | | GTTAAATGACGACGAACAGTATGGTTGCGTTGTCCCAC | | |
| | | | CGATCCATCTTTCCAGCACCTATAACTTTACCGGATTT | | |
| | | | AATGAACCGCGCGCGCATGATTACTCGCGTCGCGGCAA | | |
| | | | CCCAACGCGCGATGTGGTTCAGCGTGCGCTGGCAGAAC | | |
| | | | TGGAAGGTGGTGCTGGTGCAGTACTTACTAATACCGGC | | |
| | | | ATGTCCGCGATTCACCTGGTAACGACCGTCTTTTTGAA | | |
| | | | ACCTGGCGATCTGCTGGTTGCGCCGCACGACTGCTACG | | |
| | | | GCGGTAGCTATCGCCTGTTCGACAGTCTGGCGAAACGC | | |
| | | | GGTTGCTATCGCGTGTTGTTTGTTGATCAAGGCGATGA | | |
| | | | ACAGGCATTACGGGCAGCGCTGGCAGAAAAACCCAAAC | | |
| | | | TGGTACTGGTAGAAAGCCCAAGTAATCCATTGTTACGC | | |
| | | | GTCGTGGATATTGCGAAAATCTGCCATCTGGCAAGGGA | | |
| | | | AGTCGGGGCGGTGAGCGTGGTGGATAACACCTTCTTAA | | |
| | | | GCCCGGCATTACAAAATCCGCTGGCATTAGGTGCCGAT | | |
| | | | CTGGTGTTGCATTCATGCACGAAATATCTGAACGGTCA | | |
| | | | CTCAGACGTAGTGGCCGGCGTGGTGATTGCTAAAGACC | | |
| | | | CGGACGTTGTCACTGAACTGGCCTGGTGGGCAAACAAT | | |
| | | | ATTGGCGTGACGGGCGGCGCGTTTGACAGCTATCTGCT | | |
| | | | GCTACGTGGGTTGCGAACGCTGGTGCCGCGTATGGAGC | | |
| | | | TGGCGCAGCGCAACGCGCAGGCGATTGTGAAATACCTG | | |
| | | | CAAACCCAGCCGTTGGTGAAAAAACTGTATCACCCGTC | | |
| | | | GTTGCCGGAAAATCAGGGGCATGAAATTGCCGCGCGCC | | |
| | | | AGCAAAAAGGCTTTGGCGCAATGTTGAGTTTTGAACTG | | |
| | | | GATGGCGATGAGCAGACGCTGCGTCGTTTCCTGGGCGG | | |
| | | | GCTGTCGTTGTTTACGCTGGCGGAATCATTAGGGGGAG | | |
| | | | TGGAAAGTTTAATCTCTCACGCCGCAACCATGACACAT | | |
| | | | GCAGGCATGGCACCAGAAGCGCGTGCTGCCGCCGGGAT | | |
| | | | CTCCGAGACGCTGCTGCGTATCTCCACCGGTATTGAAG | | |
| | | | ATGGCGAAGATTTAATTGCCGACCTGGAAAATGGCTTC | | |
| | | | CGGGCTGCAAACAAGGGG | | |
| putative | Streptomyces | AL939116 | ATGGCCGGCATCGGGGCCTTCTGGTCGGTGTCCTTCCT | 173 | |
| threonine | coelicolor | | GCTGGTGCTGGTCCCGGGCGCGGACTGGGCCTACGCGA | | |
| efflux protein | | | TCACGGCGGGACTGCGCCACCGGTCGGTGCTGCCCGCC | | |
| 1 | | | GTCGGCGGCATGCTGAGCGGATACGTCCTGCTGACCGC | | |
| | | | CGTGGTCGCCGCGGGCCTGGCGACCGCGGTCGCCGGTT | | |
| | | | CACCGACGGTGCTGACCGCGCTGACGGCCGCCGGTGCG | | |
| | | | GCCTATCTGATCTGGCTAGGCGCCACGACCCTGGCCCG | | |
| | | | CCCCGCGGCGCCCCGGGCCGAGGAGGGCGACCAGGGAG | | |
| | | | ACGGCTCCGGCTCGTTGGTGGGCCGTGCGGCCAGAGGG | | |
| | | | GCGGGCATCAGCGGCCTCAACCCCAAGGCGCTGCTGCT | | |
| | | | GTTCCTCGCCCTGCTGCCGCAGTTCGCCGCCCGGGACG | | |
| | | | CGGACTGGCCCTTTGCCGCGCAGATCGTCGCCCTCGGC | | |
| | | | CTGGTGCACACGGCCAACTGCGCCGTGGTCTACACGGG | | |
| | | | CGTCGGCGCCACGGCACGCCGGATCCTGGGCGCCCGCC | | |
| | | | CGGCCGTTGCCACCGCGGTGTCCCGATTCTCGGGCGCC | | |
| | | | GCGATGATCCTCGTCGGTGCCCTGTTGCTGGTGGAGCG | | |
| | | | GCTGCTCGCCCAGGGGCCGACACATTAG | | |
| threonine | Corynebacterium | NC_003450 | GTGGACGCAGCATCATGGGTCGCATTCGCACTCGCATT | 275 | |
| efflux protein | glutamicum | | ATTGGTGGCATTAGCGGTGCCCGGACCTGACCTTGTTC | | |
| | | | TTGTTCTACATTCTGCAACCCGCGGGATCCGCACGGGG | | |
| | | | GTCATGACTGCGGCAGGAATCATGACGGGACTGATGTT | | |
| | | | ACATGCGAGTCTTGCGATAGCCGGAGCAACTGCATTAT | | |
| | | | TGCTATCAGCTCCGGGAGTATTGAGCGCTATTCAACTT | | |
| | | | CTTGGTGCGGGAGTGCTTTTGTGGATGGGCACGAACAT | | |
| | | | GTTTCGTGCTTCCCAAAATACCGGGGAATCTGAAACTG | | |
| | | | CTGCTAGTCAATCGAGTGCAGGTTATTTTCGAGGATTT | | |
| | | | ATCACCAATGCCACGAACCCGAAAGCGCTGTTGTTCTT | | |
| | | | TGCAGCGATTCTTCCTCAGTTCATTGGGAATGGGGAAG | | |
| | | | ATATGAAAATGAGGACCTTGGCATTGTGTGCCACCATC | | |
| | | | GTGCTTGGCTCAGGAGCGTGGTGGTTGGGAACAATCGC | | |
| | | | ATTGGTCAGGGGTATTGGTCTGCAAAAGTTACCGTCTG | | |
| | | | CGGATCGCATTATCACCCTGGTTGGTGGCATCGCACTG | | |
| | | | TTTCTCATTGGTGCCGGATTACTGGTTAATACTGCTTA | | |
| | | | TGGGCTTATCACT | | |
| hypo-thetical | Streptomyces | AL939116 | GTGTCGGTACCAGGGAGCGTTGCGCAGGTGACGGAGGC | 174 | |
| protein | coelicolor | | GGAGGAGCCCAAACCACAGTCGGACGAGGCCCGCAGTG | | |
| NCgl2533 | | | CCTTCCGGCAGCCCAGCGGGATCGCGGCGTCGATCGAC | | |
| related | | | GGCGAGTCGTCGACGACGTCCGAGTTCGAGATCCCGCA | | |
| | | | GGGGTTCGCCGTCCCGCGGCACGCCGGCACCGAGTCCG | | |
| | | | AGACGACCTCGGAGTTCTCGCTCCCCGACGGCCTGGAG | | |
| | | | GTGCCGCAGGCCCCGCCCGCGGACACCGAGGGCTCGGC | | |
| | | | ATTCACCATGCCGAGCACGCACAGCGCGTGGACCGCCC | | |
| | | | CGACCGCCTTCACCCCGGCGAGCGGCTTCCCGGCGGTG | | |
| | | | AGCCTGACGGACGTGCCCTGGCAGGACCGGATGCGCGC | | |
| | | | CATGCTGCGCATGCCGGTGGCCGAGCGGCCCGCGCCGG | | |
| | | | AGCCCTCGCAGAAGCACGACGACGAGACCGGCCCCGCC | | |
| | | | GTGCCGCGCGTGTTGGACCTGACGCTGCGTATCGGGGA | | |
| | | | GCTGCTGCTGGCGGGCGGTGAGGGCGCCGAGGACGTGG | | |
| | | | AGGCGGCCATGTTCGCCGTCTGCCGGTCCTACGGCCTG | | |
| | | | GACCGCTGCGAGCCGAACGTCACCTTCACCCTGCTGTC | | |
| | | | GATCTCCTACCAGCCGTCCCTGGTCGAGGACCCGGTGA | | |
| | | | CGGCGTCGCGGACGGTGCGCCGCCGCGGCACCGACTAC | | |
| | | | ACGCGGCTCGCGGCCGTCTTCCACCTGGTGGACGACCT | | |
| | | | CAGCGACCCCGACACGAACATCTCCCTGGAGGAGGCCT | | |
| | | | ACCGGCGTCTCGCGGAGATCCGCCGOAACCGCCACCCG | | |
| | | | TACCCCACCTGGGTGCTGACGGTGGCCAGCGGTCTGCT | | |
| | | | CGCGGGCGGGGCCTCGCTGCTCGTCGGTGGCGGGCTGA | | |
| | | | CCGTGTTCTTCGCGGCGATGTTCGGCTCGATGCTCGGC | | |
| | | | GACCGGCTGGCGTGGCTGTGCGCCGGGCGCGGGCTGCC | | |
| | | | GGAGTTCTACCAGTTCGCGGTGGCCGCGATGCCGCCCG | | |
| | | | CCGCGATGGGTGTCGTGCTGACGGTGACGCACGTCGAC | | |
| | | | GTGAAGGCGTCCGCGGTCATCACCGGTGGGCTGTTCGC | | |
| | | | GCTGCTGCCCGGGCGGGCGCTGGTCGCGGGGGTGCAGG | | |
| | | | ACGGTCTGACCGGCTTCTACATCACCGCCGCGGCCCGT | | |
| | | | CTGCTGGAGGTCATGTACTTCTTCGTCAGCATCGTCGC | | |
| | | | CGGGGTGCTGGTGGTGCTGTACTTCGGGGTCCAGCTGG | | |
| | | | GCGCCGAGCTCAACCCGGACGCCAAGCTCGGCACCGGT | | |
| | | | GACGAACCGTTCGTGCAGATCTTCGCCTCGATGCTGCT | | |
| | | | GTCGCTGGCCTTCGCGATCCTGCTCCAGCAGGAACGGG | | |
| | | | CCACCGTCCTCGCGGTGACCCTGAACGGCGGCATCGCC | | |
| | | | TGGTGCGTGTACGGCGCCATGAACTACGCCGGCGACAT | | |
| | | | CTCTCCGGTGGCCTCCACGGCCGCCGCGGCGGGGCTCG | | |
| | | | TGGGCCTGTTCGGGCAGCTGATGTCCAGGTACCGGTTC | | |
| | | | GCGTCGGCCCTGCCGTACACGACGGCGGCGATCGGGCC | | |
| | | | GCTGCTGCCCGGTTCGGCGACGTACTTCGGTCTGCTGG | | |
| | | | GGATCGCGCAGGGCGAGGTCGACTCGGGGCTGCTGTCG | | |
| | | | CTGTCCAACGCGGTGGCGCTGGCGATGGCCATCGCGAT | | |
| | | | CGGGGTGAACCTGGGCGGGGAGATCTCCCGGCTGTTCC | | |
| | | | TGAAGGTGCCCGGCGCCGCGAGTGCGGCGGGACGCCGG | | |
| | | | GCGGCCAAGCGGACGCGAGGGTTCTAG | | |
| hypo-thetical | Mycobacterium | AE007180 | ATGGATCAAGATCGATCGGACAACACGGCATTGCGCCG | 175 | |
| protein | tuberculosis | | TGGTCTGCGAATTGCCCTGCGCGGGCGCCGCGATCCGC | | |
| NCgl2533 | (use this to | | TGCCCGTGGCGGGCCGGCGGAGCCGGACCTCCGGCGGA | | |
| related | clone M. | | ATCGGTGACCTGCACACCCGGAAGGTGCTTGACCTGAC | | |
| | smegmatis | | CATCCGGCTCGCCGAGGTGATGTTGTCGTCCGGCTCTG | | |
| | gene) | | GCACCGCGGATGTCGTCGCCACAGCCCAGGACGTGGCT | | |
| | | | CAGGCCTACCAGCTCACCGATTGCGTTGTCGACATCAC | | |
| | | | CGTTACCACCATCATCGTGTCCGCGCTAGCGACCACAG | | |
| | | | ACACTCCGCCGGTCACCATCATGCGGTCGGTCCGGACC | | |
| | | | CGGTCCACTGACTACAGCCGGCTGGCCGAACTCGATCG | | |
| | | | ACTCGTTCAGCGGATAACCTCCGGTGGCGTCGCAGTCG | | |
| | | | ACCAGGCTCACGAGGCTATGGACGAGTTGACCGAACGG | | |
| | | | CCCCACCCCTACCCGCGCTGGCTCGCGACCGCGGGGGC | | |
| | | | GGCGGGCTTCGCACTCGGCGTCGCCATGTTGCTCGGCG | | |
| | | | GAACCTGGCTGACCTGCGTCTTGGCTGCCGTGACGTCT | | |
| | | | GGCGTGATCGACCGACTGGGCCGGCTGCTGAACCGGAT | | |
| | | | CGGGACCCCGTTGTTCTTCCAGCGCGTGTTCGGCGCGG | | |
| | | | GGATCGCGACCCTGGTCGCGGTGGCGGCTTACCTGATC | | |
| | | | GCCGGCCAGGATCCGACCGCGCTGGTGGCCACCGGAAT | | |
| | | | CGTTGTGCTGCTGTCTGGGATGACCTTGGTGGGTTCGA | | |
| | | | TGCAGGACGCGGTCACCGGGTACATGCTCACCGCACTC | | |
| | | | GCCCGGCTTGGCGACGCCCTGTTCCTGACCGCAGGGAT | | |
| | | | CGTCGTCGGCATCCTCATCTCGTTGCGGGGCGTCACCA | | |
| | | | ATGCCGGCATCCAGATCGAACTGCATGTCGACGCAACC | | |
| | | | ACGACGCTCGCCACCCCGGGCATGCCGCTACCGATTCT | | |
| | | | CGTCGCGGTAAGCGGTGCGGCGCTGTCCGGCGTGTGCC | | |
| | | | TGACGATCGCGAGCTATGCGCCGCTACGTTCTGTGGCC | | |
| | | | ACCGCCGGACTCTCGGCCGGACTCGCCGAACTGGTGCT | | |
| | | | CATCGGACTCGGCGCGGCCGGGTTCGGCCGAGTGGTCG | | |
| | | | CCACCTGGACCGCCGCGATCGGCGTCGGCTTCTTGGCC | | |
| | | | ACCCTGATCTCAATCCGTCGGCAGGCTCCCGCCTTGGT | | |
| | | | GACGGCCACCGCCGGCATCATGCCGATGCTGCCGGGCC | | |
| | | | TTGCGGTCTTCCGTGCCGTGTTCGCGTTCGCCGTCAAT | | |
| | | | GACACACCCGACGGCGGTCTGACCCAGCTGCTGGAAGC | | |
| | | | GGCCGCGACTGCACTCGCGCTTGGCAGCGGGGTGGTGT | | |
| | | | CGGGCGAGTTCCTCGCCTCACCATTGCGGTACGGCGCC | | |
| | | | AGCCGGATCGGCGACCTCTTTCGGATCGAGGGTCCACC | | |
| | | | CGGGCTCCGGCGGGCGGTCGGCCGTGTGGTGCGCCTAC | | |
| | | | AGCCGGCCAAGAGCCAGCAGCCGACCGGCACCGGTGGC | | |
| | | | CAACGGTGGCGAAGCGTCGCGCTGGAGCCGACGACGGC | | |
| | | | CGACGACGTGGACGCCGGCTATCGCGGCGATTGGCCCG | | |
| | | | CTACCTGCACCAGCGCGACCGAGGTGCGCTAG | | |
| hypo-thetical | Mycobacterium | AL022121 | ATGGATCAAGATCGATCGGACAACACGGCATTGCGCCG | 176 | |
| protein | tuberculosis | | TGGTCTGCGAATTGCCCTGCGCGGGCGCCGCGATCCGC | | |
| NCgl2533 | (use this to | | TGCCCGTGGCGGGCCGGCGGAGCCGGACCTCCGGCGGA | | |
| related | clone M. | | ATCGATGACCTGCACACCCGGAAGGTGCTTGACCTGAC | | |
| | smegmatis | | CATCCGGCTCGCCGAGGTGATGTTGTCGTCCGGCTCTG | | |
| | gene) | | GCACCGCGGATGTCGTCGCCACAGCCCAGGACGTGGCT | | |
| | | | CAGGCCTACCAGCTCACCGATTGCGTTGTCGACATCAC | | |
| | | | CGTTACCACCATCATCGTGTCCGCGCTAGCGACCACAG | | |
| | | | ACACTCCGCCGGTCACCATCATGCGGTCGGTCCGGACC | | |
| | | | CGGTCCACTGACTACAGCCGGCTGGCCGAACTCGATCG | | |
| | | | ACTCGTTCAGCGGATAACCTCCGGTGGCGTCGCAGTCG | | |
| | | | ACCAGGCTCACGAGGCTATGGACGAGTTGACCGAACGG | | |
| | | | CCCCACCCCTACCCGCGCTGGCTCGCGACCGCGGGGGC | | |
| | | | GGCGGGCTTCGCACTCGGCGTCGCCATGTTGCTCGGCG | | |
| | | | GAACCTGGCTGACCTGCGTCTTGGCTGCCGTGACGTCT | | |
| | | | GGCGTGATCGACCGACTGGGCCGGCTGCTGAACCGGAT | | |
| | | | CGGGACCCCGTTGTTCTTCCAGCGCGTGTTCGGCGCGG | | |
| | | | GGATCGCGACCCTGGTCGCGGTGGCGGCTTACCTGATC | | |
| | | | GCCGGCCAGGATCCGACCGCGCTGGTGGCCACCGGAAT | | |
| | | | CGTTGTGCTGCTGTCTGGGATGACCTTGGTGGGTTCGA | | |
| | | | TGCAGGACGCGGTCACCGGGTACATGCTCACCGCACTC | | |
| | | | GCCCGGCTTGGCGACGCCCTGTTCCTGACCGCAGGGAT | | |
| | | | CGTCGTCGGCATCCTCATCTCGTTGCGGGGCGTCACCA | | |
| | | | ATGCCGGCATCCAGATCGAACTGCATGTCGACGCAACC | | |
| | | | ACGACGCTCGCCACCCCGGGCATGCCGCTACCGATTCT | | |
| | | | CGTCGCGGTAAGCGGTGCGGCGCTGTCCGGCGTGTGCC | | |
| | | | TGACGATCGCGAGCTATGCGCCGCTACGTTCTGTGGCC | | |
| | | | ACCGCCGGACTCTCGGCCGGACTCGCCGAACTGGTGCT | | |
| | | | CATCGGACTCGGCGCGGCCGGGTTCGGCCGAGTGGTCG | | |
| | | | CCACCTGGACCGCCGCGATCGGCGTCGGCTTCTTGGCC | | |
| | | | ACCCTGATCTCAATCCGTCGGCAGGCTCCCGCCTTGGT | | |
| | | | GACGGCCACCGCCGGCATCATGCCGATGCTGCCGGGCC | | |
| | | | TTGCGGTCTTCCGTGCCGTGTTCGCGTTCGCCGTCAAT | | |
| | | | GACACACCCGACGGCGGTCTGACCCAGCTGCTGGAAGC | | |
| | | | GGCCGCGACTGCACTCGCGCTTGGCAGCGGGGTGGTGT | | |
| | | | TGGGCGAGTTCCTCGCCTCACCATTGCGGTACGGCGCC | | |
| | | | GGCCGGATCGGCGACCTCTTTCGGATCGAGGGTCCACC | | |
| | | | CGGGCTCCGGCGGGCGGTCGGCCGTGTGGTGCGCCTAC | | |
| | | | AGCCGGCCAAGAGCCAGCAGCCGACCGGCACCGGTGGC | | |
| | | | CAACGGTGGCGAAGCGTCGCGCTGGAGCCGACGACGGC | | |
| | | | CGACGACGTGGACGCCGGCTATCGCGGCGATTGGCCCG | | |
| | | | CTACCTGCACCAGCGCGACCGAGGTGCGCTAG | | |
| hypo-thetical | Thermobifida | NZ_AAAQ010 | GTGATCTCATACGGTCCGGTGGCGGATCGGTGCAGGGT | 177 | |
| protein | fusca | 00042 | GGGGGCAACTTCGGCGGCGTGGGGAACGTCTCCCCCAA | | |
| NCgl2533 | | | TGAGCTTTCCGTTTCTTCCCCTTGTATCCCACCCACTC | | |
| related | | | CCTTATGTCCCAGGTTTGGATGCGTCATTCCCGGATGG | | |
| | | | AGCATGCGTCCCGTTGGGCAGGGGTCCCTCCCGAGGAG | | |
| | | | GTGAGCGCCGGATGAACCAGGCACCGCGGCGTTCCGAC | | |
| | | | ACATCGCACTCCCCCACCCTGCTGACCCGGTTGCGGGA | | |
| | | | CTGGCGTGCCAGCCGCGGCGTGCTCGACCTGGAAGCAG | | |
| | | | AAGAGTTCGAAGACGAAGCGCCGCGTCCCGATCCGCGG | | |
| | | | GCCATGGACCTCGTCCTGCGGGTAGGGGAACTGCTGCT | | |
| | | | GGCCAGCGGGGAAGCCACCGAGACGGTCAGCGACGCGA | | |
| | | | TGCTGAGTCTGGCGGTGGCGTTCGAATTGCCCCGCAGC | | |
| | | | GAAGTGTCGGTGACGTTCACCGGCATCACCCTGTCGTG | | |
| | | | CCACCCCGGCGGGGATGAGCCCCCGGTGACCGGGGAGC | | |
| | | | GCGTGGTGCGCCGCCGCTCCCTCGACTACCACAAGGTC | | |
| | | | AACGAGCTGCACGCGCTGGTGGAAGACGCTGCGTTGGG | | |
| | | | CCTGCTCGACGTGGAGCGCGCAACCGCGCGGCTCCACG | | |
| | | | CCATCAAACGCTCCCGGCCGCACTATCCCCGCTGGGTG | | |
| | | | ATCGTGGCCGGGCTGGGGCTGATCGCCAGCAGCGCCAG | | |
| | | | TGTCATGGTGGGCGGTGGGATCATCGTGGCGGCCACGG | | |
| | | | CGTTCGCCGCCACCGTGCTCGGGGACCGGGCCGCGGGC | | |
| | | | TGGCTGGCTCGACGCGGGGTGGCCGAGTTCTACCAGAT | | |
| | | | GGCGGTGGCCGCGCTGTTGGCGGCGAGCACCGGCATGG | | |
| | | | CGCTGCTGTGGGTGAGCGAGGAGCTGGAGTTGGGGCTT | | |
| | | | CGCGCGAACGCGGTGATCACCGGGAGCATTGTGGCGCT | | |
| | | | GCTACCGGGGCGTCCCCTGGTCTCCAGCCTGCAAGACG | | |
| | | | GGATCAGCGGCGCGTACGTGTCGGCGGCGGCCCGCCTC | | |
| | | | TTGGAGGTCTTCTTCATGTTGGGGGCGATCGTCGCGGG | | |
| | | | GGTTGGCGCGGTCGCCTATACCGCGGTGCGGCTAGGGC | | |
| | | | TTTATGTGGACCTCGACAATCTGCCGTCGGCGGGGACG | | |
| | | | TCACTGGAGCCGGTCGTGCTGGCAGCTGCGGCAGGTTT | | |
| | | | GGCGCTCGCGTTCGCGGTGTCCCTGGTCGCGCCGGTGC | | |
| | | | GGGCCCTGCTGCCGATCGGCGCGATGGGGGTGCTGATC | | |
| | | | TGGGTGTGCTATGCGGGGCTGCGGGAACTGCTCGCCGT | | |
| | | | GCCGCCTGTGGTGGGGACCGGGGCGGGCGCGGTCGTGG | | |
| | | | TCGGGGTGATCGGCCACTGGCTGGCCCGGCGGACCCGG | | |
| | | | CGTCCTCCGCTCACCTTCATCATTCCGTCGATCGCTCC | | |
| | | | GCTGCTGCCGGGAAGCATCCTGTACCGGGGACTGATCG | | |
| | | | AGATGAGCACGGGGGAGCCGCTGGCCGGGGTGGCGAGC | | |
| | | | CTCGGTGAGGCGGTCGCGGTCGGCCTGGCTCTGGGTGC | | |
| | | | GGGGGTGAACCTCGGTGGTGAGCTGGTGCGGGCCTTCT | | |
| | | | CGTGGGGCGGTCTCGTGGGTGCGGGGCGCCGGGGTCGG | | |
| | | | CAGGCGGCCCGCCGGACCCGGGGAGGCTACTAG | | |
| hypo-thetical | Lactobacillus | AL935252 | ATGAATAAAGAGCGTAAGTCGGTGATGCCGCTATCACA | 178 | |
| protein | plantarum | | ACGACATCATATGACAATTCCATGGAAGGACTTTATCC | | |
| NC9l2533 | | | GTAATGAAGATGTTCCCGCTAAGCATGCTAGCTTACAA | | |
| related | | | GAGCGAACATCAATTGTTGGTCGAGTTGGTATTTTAAT | | |
| | | | GTTGTCGTGTGGGACGGGAGCGTGGCGGGTTCGTGATG | | |
| | | | CGATGAATAAGATTGCTCGCAGCCTGAATTTAACGTGC | | |
| | | | TCGGCAGATATCGGGTTGATTTCGATTCAGTACACGTG | | |
| | | | TTTTCATCATGAACGTAGTTATACGCAAGTATTATCGA | | |
| | | | TACCAAATACTGGTGTAAATACGGATAAACTAAATATT | | |
| | | | CTTGAACAGTTTGTCAAAGACTTTGATGCGAAATATGC | | |
| | | | ACGGTTAACGGTGGCACAAGTGCATGCAGCAATTGATG | | |
| | | | AAGTTCAGACGCGTCCTAAACAGTATTCGCCACTGGTT | | |
| | | | CTTGGGTTGGCAGCTGGCTTAGCCTGTAGTGGATTTAT | | |
| | | | CTTCTTACTTGGTGGAGGTATTCCCGAGATGATTTGTT | | |
| | | | CCTTTTTGGGCGCGGGCCTTGGTAACTATGTTCGGGCG | | |
| | | | CTGATGGGTAAACGGTCGATGACGACGGTTGCCGGGAT | | |
| | | | TGCGGTCAGCGTTGCGGTAGCGTGTTTGGCTTATATGG | | |
| | | | TTAGTTTTAAGATTTTTGAATATAATTTCCAAATTCTT | | |
| | | | GCCCAGCATGAGGCGGGGTATATTGGTGCCATGTTATT | | |
| | | | CGTGATTCCGGGTTTTCCGTTCATTACGAGTATGTTGG | | |
| | | | ATATCTCTAAGTTGGATATGCGCTCAGGACTGGAGCGC | | |
| | | | TTAGCTTACGCGATTATGGTTACCCTGATTGCAACTCT | | |
| | | | CGTCGGCTGGCTAGTCGCGACACTGGTGAGCTTCAAGC | | |
| | | | CAGCTGATTTCTTACCGCTAGGACTTTCACCGTTAGCG | | |
| | | | GTACTTTTATTACGATTACCAGCTAGTTTTTGCGGTGT | | |
| | | | TTACGGGTTCTCAATAATGTTTAATAGCTCGCAAAAAA | | |
| | | | TGGCCATTACCGCGGGATTTATTGGGGCCATTGCGAAT | | |
| | | | ACATTGCGCCTTGAACTAGTTGACTTGACAGCAATGCC | | |
| | | | ACCGGCCGCGGCCGCCTTTTGTGGGGCGCTCGTTGCCG | | |
| | | | GCTTGATCGCATCGGTGGTTAATCGTTATAACGGCTAT | | |
| | | | CCCCGGATTTCATTGACGGTACCTTCAATCGTAATTAT | | |
| | | | GGTTCCGGGATTATATATTTATCGTGCAATTTATAGTA | | |
| | | | TTGGCAATAATCAAATTGGTGTCGGTTCACTATGGCTG | | |
| | | | ACGAAGGCCGTGTTAATCATCATGTTTTTACCGCTCGG | | |
| | | | GCTATTTGTAGCGCGTGCGTTGTTGGATCACGAATGGC | | |
| | | | GACACTTTGATTAA | | |
| NCgl2533 | Coryne- | NC_003450 | ATGTTGAGTTTTGCGACCCTTCGTGGCCGCATTTCAAC | 276 | |
| | | bacterium | | AGTTGACGCTGCAAAAGCCGCACCTCCGCCATCGCCAC | |
| | glutamicum | | TAGCCCCGATTGATCTCACTGACCATAGTCAAGTGGCC | | |
| | | | GGTGTGATGAATTTGGCTGCGAGAATTGGCGATATTTT | | |
| | | | GCTTTCTTCAGGTACGTCAAATAGTGACACCAAGGTAC | | |
| | | | AAGTTCGAGCAGTGACCTCTGCGTACGGTTTGTACTAC | | |
| | | | ACGCACGTGGATATCACGTTGAATACGATCACCATCTT | | |
| | | | CACCAACATCGGTGTGGAGAGGAAGATGCCGGTCAACG | | |
| | | | TGTTTCATGTTGTAGGCAAGTTGGACACCAACTTCTCC | | |
| | | | AAACTGTCTGAGGTTGACCGTTTGATCCGTTCCATTCA | | |
| | | | GGCTGGTGCGACCCCGCCTGAGGTTGCCGAGAAAATCC | | |
| | | | TGGACGAGTTGGAGCAATCCCCTGCGTCTTATGGTTTC | | |
| | | | CCTGTTGCGTTGCTTGGCTGGGCAATGATGGGTGGTGC | | |
| | | | TGTTGCTGTGCTGTTGGGTGGTGGATGGCAGGTTTCCC | | |
| | | | TAATTGCTTTTATTACCGCGTTCACGATCATTGCCACG | | |
| | | | ACGTCATTTTTGGGAAAGAAGGGTTTGCCTACTTTCTT | | |
| | | | CCAAAATGTTGTTGGTGGTTTTATTGCCACGCTGCCTG | | |
| | | | CATCGATTGCTTATTCTTTGGCGTTGCAATTTGGTCTT | | |
| | | | GAGATCAAACCGAGCCAGATCATCGCATCTGGAATTGT | | |
| | | | TGTGCTGTTGGCAGGTTTGACACTCGTGCAATCTCTGC | | |
| | | | AGGACGGCATCACGGGCGCTCCGGTGACAGCAAGTGCA | | |
| | | | CGATTTTTCGAAACACTCCTGTTTACCGGCGGCATTGT | | |
| | | | TGCTGGCGTGGGTTTGGGCATTCAGCTTTCTGAAATCT | | |
| | | | TGCATGTCATGTTGCCTGCCATGGAGTCCGCTGCAGCA | | |
| | | | CCTAATTATTCGTCTACATTCGCCCGCATTATCGCTGG | | |
| | | | TGGCGTCACCGCAGCGGCCTTCGCAGTGGGTTGTTACG | | |
| | | | CGGAGTGGTCCTCGGTGATTATTGCGGGGCTTACTGCG | | |
| | | | CTGATGGGTTCTGCGTTTTATTACCTCTTCGTTGTTTA | | |
| | | | TTTAGGCCCCGTCTCTGCCGCTGCGATTGCTGCAACAG | | |
| | | | CAGTTGGTTTCACTGGTGGTTTGCTTGCCCGTCGATTC | | |
| | | | TTGATTCCACCGTTGATTGTGGCGATTGCCGGCATCAC | | |
| | | | ACCAATGCTTCCAGGTCTAGCAATTTACCGCGGAATGT | | |
| | | | ACGCCACCCTGAATGATCAAACACTCATGGGTTTCACC | | |
| | | | AACATTGCGGTTGCTTTAGCCACTGCTTCATCACTTGC | | |
| | | | CGCTGGCGTGGTTTTGGGTGAGTGGATTGCCCGCAGGC | | |
| | | | TACGTCGTCCACCACGCTTCAACCCATACCGTGCATTT | | |
| | | | ACCAAGGCGAATGAGTTCTCCTTCCAGGAGGAAGCTGA | | |
| | | | GCAGAATCAGCGCCGGCAGAGAAAACGTCCAAAGACTA | | |
| | | | ATCAGAGATTCGGTAATAAAAGG | | |
| putative | Thermobifida | NZ_AAAQ010 | ATGTCAGGGGGAGTCATGGCCGACATCACCAGAAACCG | 179 | |
| mem-brane | fusca | 00018 | GTCCTCCGGGTTGGCATTCGCGATCGCCTCTGCACTTG | | |
| protein | | | CCTTCGGCGGCTCCGGCCCCGTGGCCCGGCCGCTCATC | | |
| NCgL0580 | | | GACGCCGGACTCGACCCCCTGCACGTCACGTGGCTCCG | | |
| related | | | GGTAGCCGGAGCAGCTCTACTCCTGCTTCCCGTCGCTT | | |
| | | | TCCGCCACCACCGCACCCTGCGTACCCGCCCCGCCCTT | | |
| | | | CTCCTCGCCTACGGCGTCTTCCCGATGGCGGGAGTCCA | | |
| | | | AGCCTTCTACTTCGCAGCCATTTCCCGGATCCCCGTGG | | |
| | | | GGGTGGCGCTCCTCATCGAATTCCTCGGCCCCGTCCTC | | |
| | | | GTCCTGCTGTGGACCCGCCTCGTGCGGCGCATCCCCGT | | |
| | | | GTCCCGCGCCGCATCCCTCGGCGTGGCCCTGGCAGTCA | | |
| | | | TCGGCCTGGGCTGCCTCGTCGAAGTCTGGGCAGGCATC | | |
| | | | CGCCTGGACGCGGTCGGCCTGATCCTCGCGCTGGCTGC | | |
| | | | AGCGGTCTGCCAGGCCACCTACTTCCTGCTGTCGGACA | | |
| | | | CGGCCCGCGACGACGTCGACCCTCTCGCTGTCATCTCC | | |
| | | | TACGGCGCGCTCATCGCCACCGCACTCCTGAGCCTCCT | | |
| | | | CGCCCGCCCGTGGACCCTGCCGTGGGGCATCCTGGCCC | | |
| | | | AGAATGTCGGGTTCGGCGGGCTGGACATCCCCGCCCTC | | |
| | | | ATCCTCCTGGTGTGGCTTGCCCTGGTCGCCACCACCAT | | |
| | | | CGCCTACCTCACCGGGGTGGCCGCGGTACGGCGGCTGT | | |
| | | | CCCCTGTCGTCGCCGGGGGAGTGGCCTACCTGGAGGTC | | |
| | | | GTAACCTCTATCGTCCTGGCCTGGCTGCTGCTCGGGGA | | |
| | | | AGCGTTGAGCGTCGCCCAGCTTGTCGGGGCGGCCGCCG | | |
| | | | TGGTGACCGGTGCGTTCCTCGCCCAGACCGCGGTCCCC | | |
| | | | GACACCAGTGCCGCGCAAGGCCCGGAGACGCTGCCCAC | | |
| | | | CGCCCAGGACCCGGCCCCGCAGACCGGTTCCGCCCGCT | | |
| | | | GA | | |
| putative | Thermobifida | NZ_AAAQ010 | GTGAATAGCGACTCTCCTGGGCAGTCTGCACCGGGTCC | 180 | |
| mem-brane | fusca | 00042 | GTTCTCCCGGGCTGCGGCGCTCGTCCGCGCCGCGGGCA | | |
| protein | | | CTGCCATCCCGGCGACCTGGCTGGTCGGGGTGAGCATC | | |
| NCgl0580 | | | CTGTCGGTCCAGTTCGGCGCAGGGGTGGCGAAGAACCT | | |
| related | | | GTTCGCGGTCCTCCCCCCAAGCACCGTGGTGTGGCTGC | | |
| | | | GCCTGCTGGCTTCGGCCCTGGTGCTGCTGTGCTTCGCC | | |
| | | | CCTCCCCCACTGCGCGGGCACTCTCGCACGGACTGGCT | | |
| | | | GGTCGCGGTCGGTTTCGGCACGTCGCTGGCGGTCATGA | | |
| | | | ACTACGCCATCTACGAATCGTTTGCGCGCATCCCGCTG | | |
| | | | GGCGTGGCCGTGACCATCGAATTCCTGGGCCCGCTGGC | | |
| | | | CGTGGCCGTGGCGGGATCGCGCCGCTGGCGGGACCTGG | | |
| | | | TGTGGGTGGTGCTCGCCGGCACGGGGGTTGCGCTGCTG | | |
| | | | GGATGGGACGACGGCGGGGTCACCCTGGCAGGGGTGGC | | |
| | | | GTTCGCCGCCCTCGCGGGCGCTGCGTGGGCGTGCTAcA | | |
| | | | TCCTGCTCAGCGCAGCCACCGGCCGACGCTTCCCCGGG | | |
| | | | ACTTCCGGACTGACGGTGGCCAGTGTGATCGGCGCAGT | | |
| | | | GCTCGTCGCGCCGATGGGCCTCGCCCACAGCAGCCCGG | | |
| | | | CCCTGCTCGACCCGAGCGTGCTGCTGACCGGTCTTGCC | | |
| | | | GTGGGGCTGCTCTCCTCGGTCATCCCCTACTCCCTGGA | | |
| | | | AATGCAGGCGTTGCGCCGCATTCCGCCCGGGGTGTTCG | | |
| | | | GCATCCTGATGAGCCTAGAACCGGCGGCGGCCGCACTC | | |
| | | | GTGGGCCTGGTCCTGCTCGGGGAATTCCTCACCGTCGC | | |
| | | | CCAGTGGGCCGCGGTGGCCTGCGTGGTGGTCGCCAGTG | | |
| | | | TGGGTGCGACCCGCTCCGCCCGGCTGTGA | | |
| putative | Thermobifida | NZ_AAAQ010 | GTGTGGACGCTAGATCTTCCGCTAAAGAGAAACGATTC | 181 | |
| mem-brane | fusca | 00033 | ATCAACTAACGGTGCCTGGACGGAAACAGAGAATAGGA | | |
| protein | | | GACACAGTGGTGGGATGATCCTCTCTTTTGTCTCGTTG | | |
| NCgl0580 | | | GTTCGGCATGCCCACCTGAGGGTCCCAGCCCCGCTGCT | | |
| related | | | CACCGTCCTCAGCCTGGTCCTGCTGCACATGGGCAGCG | | |
| | | | CGGGAGCCGTGCACCTGTTCGCCATCGCGGGACCGCTC | | |
| | | | GAAGTCACCTGGCTGCGGCTGAGCTGGGCTGCGCTCCT | | |
| | | | CCTCTTCGCCGTCGGCGGGCGCCCCCTGCTCCGCGCGG | | |
| | | | CACGGGCCGCAACCTGGTCGGATCTCGCCGCTACCGCC | | |
| | | | GCCCTCGGCGTAGTCAGCGCGGGGATGACCCTCCTGTT | | |
| | | | CTCCCTCGCCCTCGACCGCATCCCGCTCGGCACCGCAG | | |
| | | | CCGCGATCGAGTTCCTCGGCCCCCTCACCGTCTCCGTG | | |
| | | | CTCGCCCTGCGCCGCCGCCGCGACCTGCTGTGGATCGT | | |
| | | | CCTCGCCGTAGCCGGAGTGCTCCTGCTCACCCGCCCGT | | |
| | | | GGCACGGGGAAGCCGACCTGCTCGGCATCGCCTTCGGC | | |
| | | | CTAGGCGGGGCCGTCTGCGTGGCGCTCTACATCGTCTT | | |
| | | | CTCCCAGACCGTCGGCTCCCGGCTGGGCGTCCTCCCCG | | |
| | | | GCCTCACCCTCGCAATGACCGTGTCCGCCCTGGTCACC | | |
| | | | GCCCCGCTGGGTCTGCCGGGGGCGATGGCGGCCGCCGA | | |
| | | | CCGGCACCTGGTGGCAGCCACCCTAGGGCTCGCACTGA | | |
| | | | TCTACCCCCTGCTGCCCCTCCTGCTGGAGATGGTGAGC | | |
| | | | CTGCAACGGATGAACCGCGGCACCTTCGGCATTCTCGT | | |
| | | | CTCCGTCGACCCCGCCATCGGGCTGCTCATCGGCCTGC | | |
| | | | TCCTGATCGGCCAGGTCCCCGTCCCCCTCCAAGTGGCG | | |
| | | | GGCATGGCCCTGGTGGTCGCCGCCGGGCTGGGCGCCAC | | |
| | | | CAGAGGCACCAGCGGACGCACACGCGGAGGCGCAGACC | | |
| | | | CGCACGCCACCGACGGGGAGCCGGAAGACCGCACCCCG | | |
| | | | GACCGCCCTGCTCCCGACGACGCCGGGCACCACACCAC | | |
| | | | CGACCCCGTCACAGTGTGA | | |
| putative | Streptomyces | SC0939113 | ATGGCCGCCACCCGCCCCGCCGTCATCGCGCTCACCGC | 182 | |
| mem-brane | coelicolor | | CCTCGCCCCCGTCTCCTGGGGCAGCACCTACGCCGTGA | | |
| protein | | | CCACCGAGTTCCTGCCGCCCGACCGGCCCCTGTTCACC | | |
| NCgl0580 | | | GGGCTGATGCGGGCTCTGCCCGCCGGCCTGCTGCTGCT | | |
| related | | | CGCCCTCGCCCGGGTGCTGCCGCGCGGCGCCTGGTGGG | | |
| | | | GGAAGGCGGCGGTGCTGGGGGTGCTGAACATCGGGGCC | | |
| | | | TTCTTCCCGCTGCTGTTCCTCGCCGCCTACCGGATGCC | | |
| | | | CGGCGGAATGGCCGCCGTCGTCGGCTCGGTCGGCCCGC | | |
| | | | TCCTCGTCGTCGGCCTCTCGGCCCTCCTGCTCGGGCAG | | |
| | | | CGGCCCACCACCCGGTCCGTTCTCACCGGTGTCGCCGC | | |
| | | | CGCGTCCGGCGTCAGCCTGGTGGTGCTGGAGGCGGCCG | | |
| | | | GGGCGCTGGACCCGCTCGGCGTGCTGGCGGCCCTCGCC | | |
| | | | GCCACCGCCTCCATGTCCACCGGCACCGTGCTCGCGGG | | |
| | | | GCGCTGGGGCCGCCCCGAAGGCGTCGGCCCGCTCGCCC | | |
| | | | TCACCGGCTGGCAACTGACCGCGGGCGGCCTGCTCCTG | | |
| | | | GCACCGCTCGCCCTGCTGGTCGAGGGTGCCCCGCCCGC | | |
| | | | CCTGGACGGCCCGGCCGTCGGCGGCTACCTCTACCTGG | | |
| | | | CGCTGGCCAACACGGCGCTGGCGTACTGGCTCTGGTTC | | |
| | | | CGCGGCATCGGCCGGCTCTCGGCCACTCAGGTCACCTT | | |
| | | | CCTCGGACCGCTCTCGCCGCTGACCGCCGCCGTGATCG | | |
| | | | GCTGGGCGGCACTCGGCGAGGCGCTCGGCCCGGTGCAA | | |
| | | | CTGGCGGGGACGGCGCTGGCCTTCGGAGCGACCCTCGT | | |
| | | | GGGCCAGACGGTACCGAGCGCGCCGCGCACGCCGCCGG | | |
| | | | TCGCCGCGGGCGCCGGTCCGTTCAGTTCTGCTTCACGA | | |
| | | | AACGGTCGAAAAGATTCGATGGACCTGACGGGTGCGGC | | |
| | | | CCTGCGACGGTAG | | |
| putative | Streptomyces | AL939119 | ATGCCGGACGGCGCGCCGGGCGGACGGTTCGGCGCCCT | 183 | |
| mem-brane | coelicolor | | CGGACCCGTCGGCCTGGTCCTCGCCGGTGGCATCTCCG | | |
| protein | | | TGCAGTTCGGCGCCGCGCTGGCGGTGAGTCTGATGCCG | | |
| NCgl0580 | | | CGGGCCGGGGCGCTCGGCGTGGTGACCCTGCGGCTCGC | | |
| related | | | CGTGGCCGCCGTCGTCATGCTCCTGGTCTGCCGGCCCC | | |
| | | | GGCTGCGCGGCCACTCCCGGGCCGACTGGGGCACGGTC | | |
| | | | GTCGTCTTCGGCATCGCCATGGCCGGCATGAACGGCCT | | |
| | | | CTTCTACCAGGCCGTCGACCGCATCCCGCTCGGCCCCG | | |
| | | | CGGTCACCCTGGAGGTGCTCGGCCCGCTCGCCCTGTCC | | |
| | | | GTCTTCGCCTCCCGCCGTGCGATGAACCTGGTCTGGGC | | |
| | | | CGCGCTCGCCCTGGCCGGTGTCTTCCTGCTGGGCGGCG | | |
| | | | GCGGCTTCGACGGCCTCGACCCGGCCGGTGCCGCCTTC | | |
| | | | GCCCTGGCGGCGGGCGCCATGTGGGCGGCGTACATCGT | | |
| | | | CTTCAGTGCCCGCACCGGACGCCGCTTCCCGCAGGCCG | | |
| | | | ACGGGCTGGCGCTGGCGATGGCGGTCGGCGCGCTGCTG | | |
| | | | TTCCTGCCGCTCGGCATCGTCGAGTCGGGGTCGAAGCT | | |
| | | | GATCGACCCGGTGACGCTCACGCTGGGCGCCGGCGTCG | | |
| | | | CCCTGCTCTCCTCCGTCCTGCCCTACACCCTCGAACTC | | |
| | | | CTCGCGCTGCGCCGTCTGCCAGCGCCGACCTTCGCCAT | | |
| | | | CCTCATGAGCCTGGAGCCCGCCATCGCCGCGGCGGCCG | | |
| | | | GTTTCCTCATCCTCGACCAGGCACTGACCGCCACCCAG | | |
| | | | TCCGCCGCCATCGCCCTGGTCATCGCGGCGAGCATGGG | | |
| | | | AGCGGTGCGGACCCAGGTGGGGCGGCGCCGGGCGAAGG | | |
| | | | CGCTTCCCGAGTAG | | |
| putative | Streptomyces | AL939110 | ATGATGACCACCGCCCGCACGTCCCCTCCCGCCCCCTG | 184 | |
| mem-brane | coelicolor | | GCACCGTCGTCCCGACCTGCTCGCGGCCGGCGCGGCCA | | |
| protein | | | CCGTCACCGTCGTGCTGTGGGCATCCGCGTTCGTCTCC | | |
| NCgl0580 | | | ATCCGCAGCGCGGGCGAGGCGTACTCGCCGGGCGCGCT | | |
| related | | | GGCGCTCGGCCGGCTGCTGTCGGGCGTCCTGACGCTCG | | |
| | | | GGGCGATCTGGCTGCTGCGCCGGGAGGGGCTGCCGCcG | | |
| | | | CGCGCGGCCTGGCGGGGGATCGCGATATCGGGGCTGCT | | |
| | | | GTGGTTCGGGTTCTACATGGTCGTCCTGAACTGGGGCG | | |
| | | | AGCAGCAGGTGGACGCCGGCACGGCCGCCCTCGTGGTC | | |
| | | | AACGTCGGCCCGATCCTCATCGCGCTGCTCGGCGCGCG | | |
| | | | GCTGCTGGGCGACGCGCTGCCGCCACGGCTGTTGACGG | | |
| | | | GGATGGCGGTGTCGTTCGCCGGTGCGGTGACCGTGGGC | | |
| | | | CTGTCCATGTCCGGCGAGGGCGGTTCCTCGCTGTTCGG | | |
| | | | GGTGGTGCTGTGCCTGCTGGCCGCGGTGGCGTACGCGG | | |
| | | | GCGGGGTGGTGGCCCAGAAGCCCGCGCTGGCGCACGCG | | |
| | | | AGCGCCCTTCAGGTGACGACGTTCGGGTGCCTGGTCGG | | |
| | | | GGCGGTGCTCTGCCTGCCGTTCGCCGGGCAGCTGGTGC | | |
| | | | ACGAGGCGGCCGGCGCGCCGGTCTCCGCCACGCTCAAC | | |
| | | | ATGGTCTACCTGGGCGTGTTCCCGACCGCCCTGGCGTT | | |
| | | | CACGACGTGGGCCTACGCCCTGGCCCGTACGACCGCCG | | |
| | | | GCCGCATGGGTGCGACCACGTACGCCGTGCCCGCGCTG | | |
| | | | GTCGTGCTGATGTCGTGGCTGGCACTGGGCGAGGTCCC | | |
| | | | GGGGCTGCTCACCCTGGCGGGCGGAGCGCTGTGCCTGG | | |
| | | | CGGGCGTGGCCGTGTCCCGCTCGCGCAGGCGCCCGGCC | | |
| | | | GCGGTCCCCGACCGGGCCGCGCCCACGGCGGAGCCACG | | |
| | | | GCGCGAGGACGCGGGGCGGGCCTAG | | |
| putative | Streptomyces | AL939108 | GTGCCGGTGCATACGTCTGACAGCGCCCGCGGCAGCCG | 185 | |
| mem-brane | coelicolor | | CGGCAAGGGCATCGGGCTCGGCCTGGCACTGGCCTCCG | | |
| protein | | | CGGTCGCCTTCGGAGGTTCCGGAGTCGCGGCCAAACCG | | |
| NCgl0580 | | | CTCATCGAGGCCGGGCTCGATCCGCTCCACGTGGTCTG | | |
| related | | | GCTGCGCGTCGCGGGCGCGGCCCTGGTGATGCTGCCGC | | |
| | | | TCGCCGTGCGCCACCGCGCCCTGCCGCGCCGCCGTCCC | | |
| | | | GCGCTGGTCGCCGGGTACGGACTGTTCGCCGTGGCCGG | | |
| | | | TGTCCAGGCGTGCTACTTCGCGGCCATCTCGCGCATCC | | |
| | | | CCGTCGGCGTCGCCCTGCTGGTCGAGTACCTGGCGCCC | | |
| | | | GCTCTGGTCCTCGGCTGGGTGCGGTTCGTGCAACGGCG | | |
| | | | GCCGGTCACACGCGCCGCCGCGCTCGGCGTGGTCCTGG | | |
| | | | CGGTCGGCGGCCTCGCCTGCGTGGTCGAGGTCTGGTCG | | |
| | | | GGGCTGGGCTTCGACGCCCTCGGACTGCTGCTCGCCCT | | |
| | | | CGGCGCCGCTTGCTGCCAGGTCGGCTACTTCGTCCTGT | | |
| | | | CCGACCAGGGCAGCGACGCCGGCGAGGAGGCGCCCGAC | | |
| | | | CCGCTCGGCGTCATCGCCTACGGCCTGCTGGTCGGCGC | | |
| | | | CGCCGTGCTCACCATCGTCGCCCGGCCCTGGTCGATGG | | |
| | | | ACTGGTCCGTCCTCGCCGGCTCGGCACCCATGGACGGC | | |
| | | | ACACCCGTCGCCGCCGCCCTGCTGCTGGCCTGGATCGT | | |
| | | | GCTCATCGCCACGGTGCTCGCCTACGTCACCGGAATCG | | |
| | | | TGGCCGTACGTCGGCTGTCGCCGCAGGTCGCCGGAGTC | | |
| | | | GTGGCGTGCCTGGAAGCGGTCATCGCGACGGTCCTGGC | | |
| | | | GTGGGTGCTGCTGGGCGAGCACCTCTCCGCCCCGCAGG | | |
| | | | TCGTCGGCGGCATCGTGGTGCTGGCGGGCGCCTTCATC | | |
| | | | GCCCAGTCCTCGACCCCGGCGAAGGGCTCCGCGGACCC | | |
| | | | GGTGGCCAGGGGCGGTCCCGAAAGGGAGTTGTCGAGCC | | |
| | | | GGGGAACGTCGACCTAG | | |
| putative | regulatory | AF265211 | GTGAAATTAAAAGATTTCGCTTTTTACGCCCCCTGTGT | 186 | |
| mem-brane | protein PecM | | CTGGGGAACCACCTACTTTGTCACCACCCAATTTCTGC | | |
| protein | [Pectobacterium | | CTGCCGACAAACCGCTGTTGGCTGCCCTGATCCGGGCG | | |
| NCgl0580 | | | TTGCCTGCTGGTATTATTCTCATTCTCGGTAAAACTCT | | |
| related | chrysanthemi] | | GCCGCCGGTCGGCTGGCTGTGGCGCTTGTTTGTACTGG | | |
| | | | GCGCACTCAATATCGGCGTGTTCTTTGTGATGCTGTTT | | |
| | | | TTTGCTGCTTATCGCCTGCCTGGCGGCGTGGTGGCGCT | | |
| | | | GGTGGGGTCGCTTCAGCCGCTGATCGTCATCCTGTTGT | | |
| | | | CTTTCCTGTTGCTGACGCAGCCGGTGCTGAAAAAGCAG | | |
| | | | ATGGTGGCGGCCGTGGCCGGCGGCATCGGTATTGCGTT | | |
| | | | GCTGATTTCGCTGCCGAAAGCGCCGCTGAACCCCGCCG | | |
| | | | GGCTGGTGGCATCGGCATTGGCGACGGTGAGTATGGCG | | |
| | | | TCCGGTCTGGTGCTGACTAAAAAGTGGGGGCGCCCGGC | | |
| | | | CGGAATGACGATGCTGACGTTTACCGGCTGGCAGCTGT | | |
| | | | TTTGCGGCGGGCTGGTGATTCTGCCGGTGCAGATGCTG | | |
| | | | ACAGAGCCGTTGCCGGATGTGGTGACCCTGACCAACCT | | |
| | | | TGCCGGTTATTTTTACCTGGCGATTCCCGGCTCTTTAC | | |
| | | | TGGCGTATTTCATGTGGTTCTCCGGTATTGAAGCTAAT | | |
| | | | TCGCCGGTGATGATGTCGATGCTGGGTTTTCTCAGCCC | | |
| | | | GTTGGTCGCGCTGTTTCTGGGCTTTTTATTTCTTCAAC | | |
| | | | AAGGACTTTCCGGAGCACAATTGGTCGGAGTGGTATTC | | |
| | | | ATTTTCTCGGCGATTATTATTGTTCAGGATGTTTCGTT | | |
| | | | ATTTAGCAGAAGAAAAAAAGTGAAGCAGTTGGAGCAAT | | |
| | | | CTGACTGTGCTGTCAAATAA | | |
| putative | Lactobacillus | AL935255 | ATGAAGCGTTTAGTTGGAACTCTGTGCGGTATTATTAG | 187 | |
| mem-brane | plantarum | | TGCCGCTTTATTTGGGCTAGGTGGAATACTAGCACAGC | | |
| protein | | | CTTTGTTAAGTGAGCAAGTTCTGACTCCGCAACAGATT | | |
| NCgl0580 | | | GTATTGTTACGGCTGTTAATCGGTGGGGCAATGTTGTT | | |
| related | | | GCTATATCGTAACTTGTTTTTCAAGCAGGCTAGAAAAA | | |
| | | | | | GCACGAAAAAGATTTGGACACATTGGCGAATTTTAACA |
| | | | CGAATTATGATATACGGCATCGCCGGCTTGTGCACGGC | | |
| | | | ACAAATTGCCTTTTTTTCTGCGATTAATTACAGTAATG | | |
| | | | CAGCAGTTGCAACTGTTTTTCAGTCCACTAGTCCGTTT | | |
| | | | ATTCTGCTTGTATTTACCGCGCTGAAAGCGAAAAGACT | | |
| | | | TCCCAGTTTATTAGCAGGAATGAGCTTAATAAGCGCAT | | |
| | | | TGATGGGAATCTGGCTTATTGTTGAATCCGGATTTAAG | | |
| | | | ACCGGATTAATAAAACCGGAAGCAATTATTTTTGGCCT | | |
| | | | GATTGCGGCTATCGGGGTTATCTTATACACCAAACTAC | | |
| | | | CTGTTCCATTGTTAAACCAAATTGCCGCAGTGGATATT | | |
| | | | TTGGGATGGGCACTAGTTATTGGCGGTGTGATAGCGTT | | |
| | | | GATTCACACACCGTTACCAAATTTAGTTAGATTTTCAA | | |
| | | | AAACGCAGCTTTTAGCGGTTCTTATCATTGTTATTCTA | | |
| | | | GCCACCGTTGTTGCGTATGATCTTTATTTAGAAAGTTT | | |
| | | | AAAGCTAATAGACGGATTTCTGGCAACTATGACTGGAC | | |
| | | | TATTTGAACCAATCAGTTCCGTACTTTTTGGCATGTTA | | |
| | | | TTCTTGCACCAAATCTTGGTTCCTCAGGCCTTGGTTGG | | |
| | | | TATTATATTGGTTGTGGGTGCAATTATGATACTGAATT | | |
| | | | TACCTCACCATATCACGGCACCTGTTCCCAGCAAAACC | | |
| | | | TGTCAATGTACGATGTCTAATCAATAG | | |
| putative | Lactobacillus | AL935252 | GTGAAGAAAATTGCGCCCCTGTTCGTTGGCTTAGGGGC | 188 | |
| mem-brane | plantarum | | CATTAGTTTTGGAATTCCGGCGTCACTATTTAAAATTG | | |
| protein | | | CGCGTCGGCAGGGGGTTGTCAATGGCCCATTGCTATTC | | |
| NCgl0580 | | | TGGTCCTTTCTGAGTGCGGTTGTGATTTTAGGTGTGAT | | |
| related | | | TCAAATTTTACGCCGTGCACGTTTGCGTAATCAGCAAA | | |
| | | | CGAATTGGAAGCAAATCGGACTGGTAATTGCGGCTGGA | | |
| | | | ACGGCTTCGGGATTTACTAACACCTTTTACATACAGGC | | |
| | | | GTTAAAGCTTATCCCAGTTGCTGTGGCCGCGGTAATGT | | |
| | | | TGATGCAGGCGGTCTGGATATCAACATTACTAGGAGCA | | |
| | | | GTGATTCATCATCGGCGTCCCTCCCGACTGCAAGTGGT | | |
| | | | TAGCATTGTTTTGGTATTGATAGGCACGATTTTAGCTG | | |
| | | | CTGGTCTGTTTCCAATTACGCAGGCGCTCTCGCCGTGG | | |
| | | | GGCTTGATGTTAAGTTTTTTAGCGGCATGCTCGTATGC | | |
| | | | TTGCACGATGCAGTTTACGGCTAGCTTAGGCAATAACT | | |
| | | | TAGACCCGTTATCGAAAACATGGTTACTGTGTTTGGGC | | |
| | | | GCTTTCATACTCATTGCTATCGTGTGGTCACCGCAATT | | |
| | | | AGTTACGGCACCCACCACGCCAGCAACAGTCGGCTGGG | | |
| | | | GAGTACTGATTGCACTATTCTCAATGGTTTTCCCACTG | | |
| | | | GTTATGTATTCATTGTTTATGCCGTACTTAGAGCTTGG | | |
| | | | CATTGGCCCAATCCTTTCTTCTTTAGAATTACCAGCCT | | |
| | | | CGATTGTTGTTGCATTTGTACTGCTTGATGAAACTATT | | |
| | | | GATTGGGTGCAAATGGTTGGCGTGGCCATTATTATTAC | | |
| | | | GGCCGTAATTCTGCCAAACGTGTTAAATATGCGACGAG | | |
| | | | TTCGGCCATAG | | |
| putative | Lactobacillus | AL935261 | ATGACAACTAACCGTTATATGAAGGGCATCATGTGGGC | 189 | |
| mem-brane | plantarum | | GATGTTGGCCTCGACCCTGTGGGGAGTCTCAGGTACAG | | |
| protein | | | TGATGCAGTTCGTATCACAAAACCAAGCCATCCCGGCT | | |
| NCgl0580 | | | GATTGGTTCTTATCTGTAAGGACGTTATCTGCTGGAAT | | |
| related | | | CATTCTGTTAGCGATTGGATTTGTGCAACAGGGTACCA | | |
| | | | AAATCTTCAAAGTCTTTAGATCTTGGGCGTCGGTTGGA | | |
| | | | CAATTAGTGGCATACGCGACAGTGGGATTGATGGCGAA | | |
| | | | TATGTATACTTTTTACATCAGTATTGAGCGCGGAACAG | | |
| | | | CCGCTGCCGCCACTATTTTACAATACTTAAGTCCTTTG | | |
| | | | TTTATTGTACTAGGAACGTTGCTGTTTAAACGGGAACT | | |
| | | | GCCTTTACGGACTGATTTAATTGCGTTTGCGGTCTCCT | | |
| | | | TGTTGGGGGTGTTTTTAGCAATCACTAAGGGTAATATT | | |
| | | | CATGAGTTGGCGATTCCGATGGATGCACTCGTCTGGGG | | |
| | | | AATCCTTTCGGGGGTAACAGCGGCCTTGTACGTAGTCT | | |
| | | | TGCCGCGAAAGATTGTAGCCGAAAATTCACCGGTCGTG | | |
| | | | ATTCTTGGTTGGGGGACATTGATTGCGGGAATCCTATT | | |
| | | | TAATTTATATCACCCAATTTGGATCGGTGCACCAAAAA | | |
| | | | TTACACCAACGCTAGTGACTTCAATTGGCGCCATCGTT | | |
| | | | TTAATCGGGACGATTTTTGCTTTCTTATCGTTGCTACA | | |
| | | | TAGTCTACAGTACGCGCCGTCTGCGGTGGTCAGTATTG | | |
| | | | TTGATGCCGTCCAACCAGTAGTGACTTTTGTACTAAGT | | |
| | | | ATTATTTTCTTAGGCTTACAAGTGACATGGGTCGAAAT | | |
| | | | CCTCGGCTCGTTATTGGTGATTGTCGCGATTTATATCT | | |
| | | | TGCAGCAGTATCGGAGTGATCCGGCTAGTGATTAG | | |
| NCgl0580 | Coryne- | NC_003450 | ATGAATAAACAGTCCGCTGCAGTGTTGATGGTGATGGG | 277 | |
| | bacterium | | TTCCGCCCTATCCCTGCAATTTGGTGCTGCCATTGGAA | | |
| | glutamicum | | CGCAGCTTTTCCCCCTCAACGGCCCCTGGGCTGTCACC | | |
| | | | TCTTTAAGGCTGTTCATCGCAGGCTTGATCATGTGCCT | | |
| | | | GGTGATCCGCCCGCGACTTCGTTCCTGGACTAAAAAAC | | |
| | | | AATGGATCGCCGTGCTGCTGTTGGGATTATCTCTTGGC | | |
| | | | GGAATGAACAGCCTGTTTTACGCATCCATCGAACTCAT | | |
| | | | CCCGCTGGGTACCGCCGTGACCATTGAGTTCCTCGGCC | | |
| | | | CCCTGATTTTCTCCGCGGTGTTAGCCCGCACGCTGAAA | | |
| | | | AACGGATTGTGCGTGGCTTTAGCGTTTCTCGGCATGGC | | |
| | | | ACTACTGGGTATCGATTCCCTCAGCGGCGAAACCCTTG | | |
| | | | ACCCACTCGGCGTCATTTTCGCAGCCGTCGCAGGAATC | | |
| | | | TTCTGGGTGTGCTACATCCTGGCATCAAAGAAAATCGG | | |
| | | | CCAACTCATCCCCGGAACAAGCGGCCTGGCCGTCGCAC | | |
| | | | TGATTATCGGCGCAGTGGCAGTATTTCCACTGGGTGCT | | |
| | | | ACACACATGGGCCCGATTTTCCAGACCCCAACCCTACT | | |
| | | | CATCCTGGCGCTTGGCACAGCACTTCTCGGGTCGCTTA | | |
| | | | TCCCCTATTCGCTGGAATTATCGGCACTGCGCCGACTC | | |
| | | | CCCGCCCCCATTTTCAGTATTCTGCTCAGCCTCGAACC | | |
| | | | GGCATTCGCCGCCGCCGTCGGCTGGATCCTGCTTGATC | | |
| | | | AAACCCCCACCGCGCTCAAGTGGGCCGCGATCATCCTT | | |
| | | | GTCATCGCGGCCAGCATCGGCGTCACGTGGGAGCCTAA | | |
| | | | AAAGATGCTTGTCGACGCGCCCCTCCACTCAAAATGCA | | |
| | | | ACGCGAAGAGGCGAGTACACACACCTAGT | | |
| drug | Streptomyces | AL939108 | GTGTCGAATGCCGTCTCCGGCCTGCCCGTAGGGCGTGG | 190 | |
| permease | coelicolor | | CCTCCTCTATCTGATCGTCGCCGGTGTCGCCTGGGGCA | | |
| NCgl2065 | | | CCGCCGGTGCCGCCGCCTCGCTGGTCTACCGGGCCAGC | | |
| related | | | GACCTGGGGCCCGTCGCCCTGTCGTTCTGGCGTTGCGC | | |
| | | | GATGGGGCTCGTGCTGCTGCTCGCCGTCCGCCCGCTGC | | |
| | | | GCCCGCGGCTGCGCCCGCGGCTGCGCCCGCGGCTGCGC | | |
| | | | CCGGCGGTCCGCGAACCGTTCGCCCGCAGGACGCTTCG | | |
| | | | GGCCGGTGTCACCGGTGTCGGGCTCGCGGTGTTCCAGA | | |
| | | | CCGCCTACTTCGCCGCCGTGCAGTCCACCGGACTCGCC | | |
| | | | GTCGCCACGGTGGTCACCCTCGGCGCGGGGCCCGTACT | | |
| | | | GATCGCCCTCGGCGCGCGCCTCGCCCTCGGTGAACAGC | | |
| | | | TGGGAGCGGGGGGTGCCGCGGCCGTGGCCGGCGCCCTC | | |
| | | | GCCGGGCTCCTGGTGCTCGTCCTCGGCGGCGGAAGCGC | | |
| | | | GACCGTCCGCCTGCCGGGTGTGCTCCTCGCGCTGCTGT | | |
| | | | CCGCCGCCGGGTACTCGGTGATGACGCTGCTCACCCGT | | |
| | | | TGGTGGGGACGGGGCGGCGGGGCGGACGCGGCCGGTAC | | |
| | | | GTCCGTGGGGGCGTTCGCCGTCACGAGTCTGTGCCTGC | | |
| | | | TGCCGTTCGCCCTGGCCGAGGGCCTGGTGCCGCACACC | | |
| | | | GCGGAACCGGTCCGGCTGCTGTGGCTCCTCGCCTACGT | | |
| | | | CGCGGCCGTCCCGACCGCGCTGGCCTACGGGCTCTACT | | |
| | | | TCGCCGGCGCGGCCGTCGTCCGGTCCGCGACGGTCTCC | | |
| | | | GTGATCATGCTCCTGGAGCCGGTCAGTGCGGCCGCGCT | | |
| | | | CGCCGTCCTGCTGCTCGGCGAGCACCTCACGGCCGCGA | | |
| | | | CCCTGGCCGGCACGCTGCTGATGCTCGGCTCGGTCGCG | | |
| | | | GGTCTCGCGGTGGCGGAGACCCGGGCGGCGCGGGAGGc | | |
| | | | GAGGACGCGGCCGGCGCCCGCGTGA | | |
| drug | Streptomyces | AL939124 | GTGAACGTCCTGCTCTCGGCCGCCTTCGTTCTGTGCTG | 191 | |
| permease | coelicolor | | GAGCTCCGGCTTCATCGGCGCCAAGCTCGGTGCTCAGA | | |
| NCgl2065 | | | CCGCGGCCACACCCACCCTCCTGATGTGGCGCTTCCTG | | |
| related | | | CCTCTCGCCGTGGCCCTGGTCGCCGCGGCGGCCGTCTC | | |
| | | | CCGGGCCGCCTGGCGGGGCCTGACACCGCGGGACGCCG | | |
| | | | GCCGGCAGATCGCCATCGGCGCCCTGTCGCAGAGCGGC | | |
| | | | TATCTGCTCAGCGTCTACTACGCCATCGAACTGGGCGT | | |
| | | | CTCCAGCGGCACCACCGCCCTCATCGACGGCGTCCAGC | | |
| | | | CACTCGTCGCCGGCGCGCTCGCCGGTCCCCTGCTGCGC | | |
| | | | CAGTACGTCTCGCGCGGGCAGTGGCTCGGACTGTGGCT | | |
| | | | GGGCTGTCGGGCGTGGCCACCGTGACGGTCGCCGACG | | |
| | | | CCGGGGCGGCGGGCGCGGAGGTGGCCTGGTGGGCGTAT | | |
| | | | CTCGTCCCGTTTCTCGGCATGCTGTCGCTGGTGGCGGC | | |
| | | | CACCTTCCTGGAGGGCCGCACAAGGGTGCCGGTCGCGC | | |
| | | | CCCGCGTCGCCCTGACGATCCACTGTGCGACCAGTGCC | | |
| | | | GTCCTCTTCTCCGGACTGGCCCTGGGCCTCGGGGCGGC | | |
| | | | GGCACCGCCGGCCGGTTCCTCGTTCTGGCTGGCGACCG | | |
| | | | CCTGGCTGGTGGTCCTGCCGACCTTCGGCGGCTACGGC | | |
| | | | CTGTACTGGCTGATCCTGCGCCGGTCCGGCATCACCGA | | |
| | | | GGTCAACACCCTCATGTTCCTCATGGCCCCGGTCACGG | | |
| | | | CCGTGTGGGGCGCCCTCATGTTCGGTGAGCCGTTCGGC | | |
| | | | GTCCAGACCGCCCTCGGCCTGGCGGTCGGCCTCGCGGC | | |
| | | | CGTGGTCGTCGTCCGGCGCGGGGGCGGCGCGCGCCGGG | | |
| | | | AGCGGCCCGTGCGGTCCGGCGCGGACCGTCCGGCGGCC | | |
| | | | GGAGGGCCGACGGCGGACCAGCCGACGAACAGGCCGAC | | |
| | | | CGACAGGCCGACGGCGGCCGGGTCGACCGACAGGCCGA | | |
| | | | CGGCGGACAGGCGCTGA | | |
| drug | Thermobifida | NZ_AAAQ010 | ATGTCTGATTTCCGCAAGGGTGTGCTCTATGGCGCCAG | 192 | |
| permease | fusca | 00034 | TTCGTACTTCATGTGGGGCTTTCTGCCGCTCTACTGGC | | |
| NCgI2065 | | | CGCTGCTGACCCCGCCTGCCACGGCCTTTGAGGTCCTC | | |
| related | | | TTACATAGGATGATCTGGTCATTGGTTGTCACGCTCGT | | |
| | | | GGTGCTGCTGGTGCAGCGGAACTGGCAGTGGATCCGCG | | |
| | | | GCGTGCTGCGGAGCCCGCGGCGCCTGCTGCTGCTCCTC | | |
| | | | GCCTCGGCCGCACTCATCTCCCTGAACTGGGGCGCTTT | | |
| | | | CATCACCGCCGTGACGACCGGGCACACCCTGCAATCGG | | |
| | | | CACTCGCCTACTTCATCAACCCGCTGGTGAGCGTGGCG | | |
| | | | CTAGGGCTGCTGGTGTTCAAAGAGCGGCTGCGCCCAGG | | |
| | | | CCAGTGGGCCGCACTGCTGCTCGGCGTCCTCGCCGTAG | | |
| | | | CCGTGCTGACCGTCGACTACGGCTCCCTGCCTTGGTTG | | |
| | | | GCGCTGGCCATGGCGTTCTCCTTCGCCGTCTACGGCGC | | |
| | | | GCTGAAGAAGTTCGTGGGCTTGGACGGGGTGGAGAGCC | | |
| | | | TCAGCGCGGAGACCGCGGTCCTGTTCCTGCCTGCGCTG | | |
| | | | GGCGGCGCGGTCTACCTGGAAGTGACCGGTACCGGCAC | | |
| | | | CTTCACCTCGGTCTCCCCCCTCCACGCGTTGCTGCTGG | | |
| | | | TGGGCGCCGGAGTGGTGACCGCGGCGCCGCTCATGCTG | | |
| | | | TTCGGCGCGGCAGCGCACCGCATCCCGCTGACCCTGGT | | |
| | | | CGGGCTGCTGCAGTTCATGGTTCCGGTGATGCACTTCC | | |
| | | | TCATCGCCTGGCTGGTCTTCGGGGAGGACCTGTCACTT | | |
| | | | GGCCGGTGGATCGGGTTCGCCGTGGTGTGGACCGCGCT | | |
| | | | CGTGGTGTTCGTCGTCGACATGCTCCGCCACGCACGCC | | |
| | | | ACACCCCCCGCCCTGCCCCGTCAGCCCCTGTCGCTGAG | | |
| | | | GAAGCCGAGGAAACTGCGGCTAGTTGA | | |
| drug | Streptomyces | AL939120 | GTGGCCGGGTCGTCCAGGAGTGATCAGCGAGTAGGCCT | 193 | |
| permease | coelicolor | | GCTGAACGGCTTCGCGGCGTACGGGATGTGGGGGCTCG | | |
| NCgl2065 | | | TCCCGCTGTTCTGGCCGCTGCTCAAGCCCGCCGGGGCC | | |
| related | | | GGGGAGATCCTCGCCCACCGGATGGTGTGGTCCCTCGC | | |
| | | | CTTCGTCGCCGTCGCCCTCCTCTTCGTACGGCGCTGGG | | |
| | | | CCTGGGCCGGCGAGCTGCTGCGGCAGCCGCGCAGGCTC | | |
| | | | GCCCTGGTCGCGGTGGCCGCCGCGGTCATCACCGTCAA | | |
| | | | CTGGGGCGTCTACATCTGGGCCGTGAACAGCGGCCATG | | |
| | | | TCGTCGAGGCCTCGCTCGGCTACTTCATCAACCCGCTG | | |
| | | | GTCACCATCGCGATGGGCGTGCTGTTGCTCAAGGAGCG | | |
| | | | GCTGCGGCCCGCGCAGTGGGCGGCGGTCGGCACCGGCT | | |
| | | | TCGCGGCCGTGCTCGTGCTCGCCGTCGGCTACGGCCAG | | |
| | | | CCGCCGTGGATCTCGCTCTGCCTCGCCTTCTCCTTCGC | | |
| | | | CACGTACGGCCTGGTGAAGAAGAAGGTCAACCTCGGGG | | |
| | | | GTGTCGAGTCGCTGGCCGCCGAGACGGCGATCCAGTTC | | |
| | | | CTTCCGGCGCTCGGCTACCTGCTGTGGCTGGGCGCGCA | | |
| | | | GGGCGAGTCGACCTTCACCACGGAGGGCGCCGGACACT | | |
| | | | CGGCCCTGCTCGCCGCGACCGGCGTCGTCACGGCGATC | | |
| | | | CCGCTGGTCTGCTTCGGCGCGGCGGCGATCCGCGTCCC | | |
| | | | GCTGTCCACACTGGGGCTGCTGCAATACCTGGCGCCGG | | |
| | | | TCTTCCAGTTCCTGCTCGGCGTCCTCTACTTCGGCGAG | | |
| | | | GCCATGCCGCCCGAGCGCTGGGCCGGCTTCGGGCTGGT | | |
| | | | CTGGCTGGCGCTGACGCTGCTCACCTGGGACGCGTTGC | | |
| | | | GCACGGCCCGCCGGACCGCACGGGCGCTGAGGGAACAA | | |
| | | | CTGGACCGGTCGGGCGCGGGCGTACCACCGCTCAAGGG | | |
| | | | GGCCGCCGCCGCGCGGGAGCCGAGGGTCGTGGCCTCGG | | |
| | | | GGACTCCGGCACCGGGCGCCGGCGACGCACCGCAGCAA | | |
| | | | CAGCAACAGCAACAGCAACAGCAACAGCAACAGCAACA | | |
| | | | CGGAACCAGGGCCGGGAAGCCGTAG | | |
| drug | Lactobacillus | AL935253 | GTGAAGAAAGCATATCTTTACATTGCAATTTCGACCTT | 194 | |
| permease | plantarum | | AATGTTTAGTTCGATGGAAATTGCGCTAAAGATGGCCG | | |
| NCgl2065 | | | GCAGTGCCTTTAACCCAATCCAATTGAATCTAATTCGA | | |
| related | | | TTTTTTATTGGGGCAATTGTGTTACTGCCATTTGCATT | | |
| | | | GCGGGCATTAAAGCAAACCGGACGAAAGTTAGTGAGTG | | |
| | | | CTGACTGGCGGCTATTTGCTTTAACCGGGCTAGTGTGT | | |
| | | | GTCATTGTCAGTATGTCGCTTTACCAACTCGCGATTAC | | |
| | | | GGTCGATCAAGCTTCGACTGTGGCCGTATTGTTTAGTT | | |
| | | | GTAATCCGGTATTTGCGCTATTATTCTCCTATTTAATT | | |
| | | | CTGCGAGAACGGTTGGGTCGAGCTAACTTGATCTCCGT | | |
| | | | CGTGATTTCTGTGATTGGGTTGTTGATCATTGTTAATC | | |
| | | | CGGCCCATTTGACGAATGGGCTCGGGCTGCTATTAGCC | | |
| | | | ATCGGGTCTGCCGTGACTTTTGGGCTGTACAGTATCAT | | |
| | | | CTCGCGTTATGGGTCTGTTAAACGGGGCTTGAATGGGC | | |
| | | | TGACGATGACTTGTTTTACTTTCTTTGCTGGTGCGTTT | | |
| | | | GAACTTCTAGTTTTAGCTTGGATTACTAAGATTCCGGC | | |
| | | | TGTCGCCAATGGGTTGACGGCCATCGGTTTGCGGCAAT | | |
| | | | TTGCTGCCATTCCGGTTTTGGTGAATGTTAATCTCAAC | | |
| | | | TATTTCTGGTTACTATTTTTTATCGGCGTTTGTGTTAC | | |
| | | | TGGTGGGGGCTTCGCGTTTTATTTCTTGGCAATGGAAC | | |
| | | | AAACCGATGTTTCAACGGCTTCCCTAGTATTCTTCATT | | |
| | | | AAGCCGGGGTTGGCGCCAATCTTAGCAGCGTTGATCCT | | |
| | | | CCATGAACAAATTTTGTGGACGACAGTGGTCGGAATTG | | |
| | | | TTGTGATTTTGATTGGTTCCGTCGTGACCTTTGTCGGT | | |
| | | | AATCGGTTCCGTGAACGGGATACGATGGGTGCGATTGA | | |
| | | | GCAGCCAACAGCGGCCGCCACTGATGATGAACATGTCA | | |
| | | | TCAAAGCCGCACACGCCGTTTCAAATCAAGAAAATTAA | | |
| NCgl2065 | Coryne- | NC_003450 | GTGAATGATGCTGGCTTGAAGACGCGAAACCCGGTGcT | 278 | |
| | bacterium | | TGCCCCCATTTTGATGGTGGTTAACGGCGTGTCCCTTT | | |
| | glutamicum | | ATGCCGGAGCAGCGTTGGCGGTGGGGCTGTTTGAGAGT | | |
| | | | TTCCCACCCGCGTTGGTTGCGTGGATGCGAGTAGCAGC | | |
| | | | GGCTGCGGTGATTTTGCTTGTGCTGTATCGGCCTGCAG | | |
| | | | TGCGAAATTTTATTGGGCAGACCGGGTTTTATGCGGCG | | |
| | | | GTGTATGGCGTTTCCACGCTTGCCATGAACATCACGTT | | |
| | | | CTATGAGGCGATCGCCCGCATTCCGATGGGTACCGCGG | | |
| | | | TGGCCATTGAGTTCTTGGGACCTATTGCAGTGGCCGCG | | |
| | | | TTGGGCAGTAAGACGCTGCGGGATTGGGCTGCGTTGGT | | |
| | | | TTTAGCTGGCATCGGAGTGATAATTATTAGCGGTGCGC | | |
| | | | AGTGGTCGGCCAACAGCGTGGGCGTCATGTTTGCACTG | | |
| | | | GCAGCAGCATTACTGTGGGCTGCGTACATCATCGCGGG | | |
| | | | AAACCGCATTGCAGGCGATGCCTCCTCAAGTAGAACCG | | |
| | | | GCATGGCGGTGGGATTCACGTGGGCATCAGTGTTGTCT | | |
| | | | TTGCCGTTGGCGATCTGGTGGTGGCCGGGTCTGGGAGC | | |
| | | | AACGGAACTTACGTTAATCGAGGTCATCGGATTAGCAC | | |
| | | | TTGGTTTGGGCGTGCTGTCGGCGGTGATTCCTTATGGC | | |
| | | | CTTGACCAGATTGTGCTCCGCATGGCCGGGCGATCCTA | | |
| | | | CTTTGCGCTGCTCCTGGCTATTTTGCCGATCAGCGCCG | | |
| | | | CGCTCATGGGAGCGCTTGCGCTGGGCCAAATGTTGTCG | | |
| | | | GTGGCTGAGCTTGTCGGCATTGTGCTGGTTGTCATCGC | | |
| | | | AGTTGCTTTGCGACGCCCCTCC | | |
| hypo-thetical | Thermobifida | NZ_AAAQ010 | GTGAACGCCGACACCCTCCTGTGGTCCCTGCTGCTCGG | 195 | |
| mem-brane | fusca | 00035 | CGTCATCGTCGTCGCTGCCGCGGCGGCGATCATCATCC | | |
| protein | | | CCACCGTGCGGAACAGCAGCACGGCTCCCCCGCCCGGG | | |
| NCgl2829 | | | GCGGTAGGGACCGCGCTGGGTGCGGCGCTCACCGCCGC | | |
| related | | | TGCCCTCGGCATAGCGGGCAGCGGAACCGCTCCCGCCT | | |
| | | | CCGAAGTGCCCGCGGGCTCCGGCCAGGTCCGTACCGTC | | |
| | | | GACGTGGTGCTGGGCGACATGACCGTCTCCCCGTCCCA | | |
| | | | CGTCACCGTCGCGCCCGGCGACTCCCTCGTCCTCCGCG | | |
| | | | TGCGCAACGAGGACACTCAAGTCCACGACTTGGTGGTG | | |
| | | | GAGACCGGGGCCCGCACGCCCCGGCTTGCGCCAGGTGA | | |
| | | | CAGCGCCACCCTGCAGGTCGGCACGGTGACCGAGCCCA | | |
| | | | TCGACGCCTGGTGCACTGTGCTCGGGCACAGCGCCGCG | | |
| | | | GGCATGCGGATGCGGATCGACACCACTGACACTGCGGA | | |
| | | | CAGCGCTGACAGCCCCGACACGCCCGCTGGTGCGGACA | | |
| | | | GCGGTCCGCCCGCACCGCTCCCCCTGTCCGCGGAGATG | | |
| | | | AGCGACGACTGGCAGCCCCGCGACGCTGTCCTGCCGCC | | |
| | | | CGCGCCGGACCGCACCGAACACGAAGTGGAGATCCGGG | | |
| | | | TCACCGAAACCGAGCTGGAGGTCGCCCCCGGGGTGCGG | | |
| | | | CAGAGCGTGTGGACGTTCGGCGGCGACGTCCCCGGCCC | | |
| | | | TGTGCTGCGCGGCAAGGTCGGCGACGTGTTCACCGTGA | | |
| | | | CCTTCGTCAACGACGGCACGATGGGCCACGGCATCGAC | | |
| | | | TTCCACGCCAGCAGTCTCGCCCCGGACGAGCCGATGCG | | |
| | | | CACGATCAATCCGGGCGAGCGCCTCACCTACCGGTTCC | | |
| | | | GCGCGGAGAAAGCCGGTGCCTGGGTGTACCACTGTTCG | | |
| | | | ACCTCGCCCATGCTGCAGCACATCGGCAACGGCATGTA | | |
| | | | CGGCGCGGTCATCATCGACCCGCCCGACCTTGAGCCGG | | |
| | | | TCGACCGTGAATACCTGCTGGTCCAAGGAGAGCTGTAC | | |
| | | | CTGGGCGAGCCGGGCAGCGCCGACCAGGTCGCCCGGAT | | |
| | | | GCGGGCGGGTGAGCCGGACGCGTGGGTGTTCAACGGGG | | |
| | | | TCGCCGCCGGCTACGCCCACGCGCCGTTGACCGCCGAG | | |
| | | | GTCGGGGAGCGCGTCCGGATCTGGGTGGTGGCGGCCGG | | |
| | | | TCCCACCAGCGGAACGTCTTTCCACATCGTCGGCGCCC | | |
| | | | AGTTCGACACCGTCTACAAGGAGGGTGCCTACCTGGTG | | |
| | | | CGCCGTGGCGACGCCGGGGGCGCGCAAGCGCTCGACCT | | |
| | | | GGCGGTCGCCCAAGGCGGTTTTGTCGAAACAGTGTTCC | | |
| | | | CCGAAGCGGGCTCCTATCCCTTTGTCGACCATGACATG | | |
| | | | CGGCATGCCGAGAACGGGGCCCGCGGCTTCTTCACGAT | | |
| | | | CACGGAGTGA | | |
| NCgl2829 | Coryne- | NC_003450 | ATGGTTCTGGTAATCGCCGGAATAATCCACCCGCTCCT | 279 | |
| | bacterium | | GCCGGAATACCGTTGGGTTCTCATTCACCTTTTCACCC | | |
| | glutamicum | | TTGGTGCCATCACCAATTCGATTGTGGTGTGGTCGCAG | | |
| | | | CATTTCACGGAAAAGTTTCTGCATTTAAAGCTTGAGGA | | |
| | | | ATCGAAACGCCCTGCGCAGCTACTGAAAATTCGGGTGC | | |
| | | | TGAATGTGGGAATTATCGTCACGATTATTGGGCAGATG | | |
| | | | ATCGGTCAGTGGATCGTCACCAGTGTCGGCGCGACGAT | | |
| | | | TGTGGGCGGTGCTTTGGCGTGGCACGCAGGCAGTTTGG | | |
| | | | CATCACAGTTCCGGAGCGCAAAACGCGGTCAGCCTTTC | | |
| | | | GCGTCGGCAGTGATCGCGTATGTTGCCAGCGCGTGCTG | | |
| | | | CCTGCCGTTTGGCGCATTTGCCGGAGCGTTGTTGTCCA | | |
| | | | AGGAGCTGTCGGGACATCTCCAGGAACGAGTCCTTCTC | | |
| | | | ACCCACACGGTGATTAATTTTCTAGGTTTCGTGGGATT | | |
| | | | TGCTGCGCTCGGTTCGCTGTCGGTGCTGTTCGCCGCGA | | |
| | | | TTTGGCGCACCAAAATTCGCCACAATTTCACCCCGTGG | | |
| | | | TCTGTGGGGATCATGGCGGTGAGCCTGCCGATCATCGT | | |
| | | | CACGGGCATCCTGCTCAACAACGGCTATGTCGCCGCCA | | |
| | | | CAGGCCTGGCCGCGTACGTGGCAGCATGGTTGCTGGCC | | |
| | | | ATGGTGGGGTGGGGGAAGGCGTCGATAAGCAATTTAAG | | |
| | | | CTTTTCGACGTCCACCTCCACCACCGCACCCCTTTGGC | | |
| | | | TCGTGGGCACGCTTGTGTGGCTGGCGGTGCAGGCGGTG | | |
| | | | ATGCATGACGGCGAGCTTTACCATGTGGAAGTTCCCAC | | |
| | | | GATTGCGCTGGTCATCGGCTTTGGCGCGCAGCTTCTGA | | |
| | | | TCGGTGTGATGAGTTATCTACTGCCGTCGACGATGGGT | | |
| | | | GGCGGCGCGAGCGCGGTGCGGACTGGAACGCACATTTT | | |
| | | | AAACACTGCGGGGCTGTTTAGGTGGACGCTGATCAACG | | |
| | | | GTGGCCTGGCGATTTGGCTGCTCACCGACAATTCGTGG | | |
| | | | CTGCGCGTCGTGGTGTCTCTGCTGAGTATCGGAGCGTT | | |
| | | | GGCAGTTTTTGTCATTCTGCTGCCCAAGGCTGTGCGGG | | |
| | | | CGCAGCGCGGAGTGATCACCAAAAAGCGCGAACCAATT | | |
| | | | ACTCCGCCGGAGGAGCCTCGACTCAATCAAATTACCGC | | |
| | | | GGGAATCTCTGTGCTTGCCCTGATTTTGGCAGCATTCG | | |
| | | | GTGGGCTCAACCCCGGTGTTGCGCCGGTGGCAAGCTCA | | |
| | | | AATGAAGACGTCTATGCTGTGACCATTACCGCAGGTGA | | |
| | | | CATGGTGTTTATCCCTGATGTGATTGAAGTGCCTGCTG | | |
| | | | GTAAATCACTCGAAGTCACGATGCTCAACGAAGACGAC | | |
| | | | ATGGTGCACGATCTGAAATTTGCCAACGGTGTGCAAAC | | |
| | | | CGGACGTGTGGCGCCAGGTGATGAAATTACGGTGACCG | | |
| | | | TCGGCGATATTTCCGAAGACATGGACGGCTGGTGCACC | | |
| | | | ATCGCTGGGCACCGCGCGCAAGGAATGGATCTGGAAGT | | |
| | | | AAAGGTTGCGGCTCCGAAT | | |
| yggA | Escherichia coli | U28377 | GTGTTTTCTTATTACTTTCAAGGTCTTGCACTTGGGGC | 280 | |
| | | | GGCTATGATCCTACCGCTCGGTCCACAAAATGCTTTTG | | |
| | | | TGATGAATCAGGGCATACGTCGTCAGTACCACATTATG | | |
| | | | ATTGCCTTACTTTGTGCTATCAGCGATTTGGTCCTGAT | | |
| | | | TTGCGCCGGGATTTTTGGTGGCAGCGCGTTATTGATGC | | |
| | | | AGTCGCCGTGGTTGCTGGCGCTGGTCACCTGGGGCGGC | | |
| | | | GTAGCCTTCTTGCTGTGGTATGGTTTTGGCGCTTTTAA | | |
| | | | AACAGCAATGAGCAGTAATATTGAGTTAGCCAGCGCCG | | |
| | | | AAGTCATGAAGCAAGGCAGATGGAAAATTATCGCCACC | | |
| | | | ATGTTGGCAGTGACCTGGCTGAATCCGCATGTTTACCT | | |
| | | | GGATACTTTTGTTGTACTGGGCAGCCTTGGCGGGCAAC | | |
| | | | TTGATGTGGAACCAAAACGCTGGTTTGCACTCGGGACA | | |
| | | | ATTAGCGCCTCTTTCCTGTGGTTCTTTGGTCTGGCTCT | | |
| | | | TCTCGCAGCCTGGCTGGCACCGCGTCTGCGCACGGCAA | | |
| | | | AAGCACAGCGCATTATCAATCTGGTTGTGGGATGTGTT | | |
| | | | ATGTGGTTTATTGCCTTGCAGCTGGCGAGAGACGGTAT | | |
| | | | TGCTCATGCACAAGCCTTGTTCAGT | | |

[0446] A number of embodiments of the invention have been described. Nevertheless, it will be understood that various modifications may be made without departing from the spirit and scope of the invention. Accordingly, other embodiments are within the scope of the following claims.

1. An Enterobacteriaceae or coryneform bacterium comprising at least one of:
(a) a nucleic acid molecule comprising a sequence encoding a heterologous bacterial aspartokinase polypeptide or a functional variant thereof;
(b) a nucleic acid molecule comprising a sequence encoding a heterologous bacterial aspartate semialdehyde dehydrogenase polypeptide or a functional variant thereof;
(c) a nucleic acid molecule comprising a sequence encoding a heterologous bacterial phosphoenolpyruvate carboxylase polypeptide or a functional variant thereof;
(d) a nucleic acid molecule comprising a sequence encoding a heterologous bacterial pyruvate carboxylase polypeptide or a functional variant thereof;
(e) a nucleic acid molecule comprising a sequence encoding a heterologous bacterial dihydrodipicolinate synthase polypeptide or a functional variant thereof;
(f) a nucleic acid molecule comprising a sequence encoding a heterologous bacterial homoserine dehydrogenase polypeptide or a functional variant thereof;
(g) a nucleic acid molecule comprising a sequence encoding a heterologous bacterial homoserine O-acetyltransferase polypeptide or a functional variant thereof;
(h) a nucleic acid molecule comprising a sequence encoding a heterologous bacterial O-acetylhomoserine sulfhydrylase polypeptide or a functional variant thereof;
(i) a nucleic acid molecule comprising a sequence encoding a heterologous bacterial methionine adenosyltransferase polypeptide or a functional variant thereof;
(j) a nucleic acid molecule comprising a sequence encoding a heterologous bacterial mcbR gene product polypeptide or a functional variant thereof;
(k) a nucleic acid molecule comprising a sequence encoding a heterologous bacterial O-succinylhomoserine/acetylhomoserine (thiol)-lyase polypeptide or a functional variant thereof;
(l) a nucleic acid molecule comprising a sequence encoding a heterologous bacterial cystathionine beta-lyase polypeptide or a functional variant thereof;
(m) a nucleic acid molecule comprising a sequence encoding a heterologous bacterial 5-methyltetrahydrofolate homocysteine methyltransferase polypeptide or a functional variant thereof; and
(n) a nucleic acid molecule comprising a sequence encoding a heterologous bacterial 5-methyltetrahydropteroyltriglutamate-homocysteine methyltransferase polypeptide or a functional variant thereof.

2. The bacterium of claim 1, wherein the bacterium is an Escherichia coli bacterium.

3. The bacterium of claim 1, wherein the bacterium is a Corynebacterium glutamicum bacterium.

4. The bacterium of claim 1, wherein the sequence encodes a polypeptide with reduced feedback inhibition.

5. The bacterium of claim 1, wherein the polypeptide is selected from an Enterobacteriaceae polypeptide, an Actinomycetes polypeptide, or a variant thereof.

6. The bacterium of claim 5, wherein the polypeptide is a polypeptide of one of the following Actinomycetes species: Mycobacterium smegmatis, Streptomyces coelicolor, Thermobifida fusca, Amycolatopsis mediterranei and coryneform bacteria, including Corynebacterium glutamicum.

7. The bacterium of claim 5, wherein the polypeptide is a polypeptide of one of the following Enterobacteriaceae species: Erwinia chysanthemi and Escherichia coli.

8. The bacterium of claim 1, wherein the heterologous bacterial aspartokinase polypeptide or functional variant thereof is chosen from:
(a) a Mycobacterium smegmatis aspartokinase polypeptide or a functional variant thereof;
(b) an Amycolatopsis mediterranei aspartokinase polypeptide or a functional variant thereof;
(c) a Streptomyces coelicolor aspartokinase polypeptide or a functional variant thereof;
(d) a Thermobifida fusca aspartokinase polypeptide or a functional variant thereof;
(e) an Erwinia chrysanthemi aspartokinase polypeptide or a functional variant thereof; and
(f) a Shewanella oneidensis aspartokinase polypeptide or a functional variant thereof.

9. The bacterium of claim 1, wherein the heterologous bacterial aspartate semialdehyde dehydrogenase polypeptide or functional variant thereof is chosen from:
(a) a Mycobacterium smegmatis aspartate semialdehyde dehydrogenase polypeptide or a functional variant thereof;
(b) an Amycolatopsis mediterranei aspartate semialdehyde dehydrogenase polypeptide or a functional variant thereof;
(c) a Streptomyces coelicolor aspartate semialdehyde dehydrogenase polypeptide or a functional variant thereof; and
(d) a Thermobifida fusca aspartate semialdehyde dehydrogenase polypeptide or a functional variant thereof.

10. The bacterium of claim 1, wherein the heterologous bacterial phosphoenolpyruvate carboxylase polypeptide or a functional variant thereof is chosen from:
(a) a Mycobacterium smegmatis phosphoenolpyruvate carboxylase polypeptide or a functional variant thereof;
(b) a Streptomyces coelicolor phosphoenolpyruvate carboxylase polypeptide or a functional variant thereof;
(c) a Thermobifida fusca phosphoenolpyruvate carboxylase polypeptide or a functional variant thereof; and
(d) an Erwinia chrysanthemi phosphoenolpyruvate carboxylase polypeptide or a functional variant thereof.

11. The bacterium of claim 1, wherein the heterologous bacterial pyruvate carboxylase polypeptide or a functional variant thereof is chosen from:
(a) a Mycobacterium smegmatis pyruvate carboxylase polypeptide or a functional variant thereof; and
(b) a Streptomyces coelicolor pyruvate carboxylase polypeptide or a functional variant thereof.

12. The bacterium of claim 1, wherein the bacterium comprises at least two of:
(a) a nucleic acid molecule encoding a heterologous bacterial aspartokinase polypeptide or a functional variant thereof;
(b) a nucleic acid molecule encoding a heterologous bacterial aspartate semialdehyde dehydrogenase polypeptide or a functional variant thereof;
(c) a nucleic acid molecule encoding a heterologous bacterial phosphoenolpyruvate carboxylase polypeptide or a functional variant thereof;
(d) a nucleic acid molecule encoding a heterologous bacterial pyruvate carboxylase polypeptide or a functional variant thereof;
(e) a nucleic acid molecule comprising a sequence encoding a heterologous bacterial dihydrodipicolinate synthase polypeptide or a functional variant thereof;
(f) a nucleic acid molecule comprising a sequence encoding a heterologous bacterial homoserine dehydrogenase polypeptide or a functional variant thereof;
(g) a nucleic acid molecule comprising a sequence encoding a heterologous bacterial homoserine O-acetyltransferase polypeptide or a functional variant thereof;
(h) a nucleic acid molecule comprising a sequence encoding a heterologous bacterial O-acetylhomoserine sulfhydrylase polypeptide or a functional variant thereof;
(i) a nucleic acid molecule comprising a sequence encoding a heterologous bacterial methionine adenosyltransferase polypeptide or a functional variant thereof;
(j) a nucleic acid molecule comprising a sequence encoding a heterologous bacterial mcbR gene product polypeptide or a functional variant thereof;
(k) a nucleic acid molecule comprising a sequence encoding a heterologous bacterial O-succinylhomoserine/acetylhomoserine (thiol)-lyase polypeptide or a functional variant thereof;
(l) a nucleic acid molecule comprising a sequence encoding a heterologous bacterial cystathionine beta-lyase polypeptide or a functional variant thereof;
(m) a nucleic acid molecule comprising a sequence encoding a heterologous bacterial 5-methyltetrahydrofolate homocysteine methyltransferase polypeptide or a functional variant thereof; and
(n) a nucleic acid molecule comprising a sequence encoding a heterologous bacterial 5-methyltetrahydropteroyltriglutamate-homocysteine methyltransferase polypeptide or a functional variant thereof.

13. The bacterium of claim 1, wherein the bacterium comprises at least three of:
(a) a nucleic acid molecule encoding a heterologous bacterial aspartokinase polypeptide or a functional variant thereof;
(b) a nucleic acid molecule encoding a heterologous bacterial aspartate semialdehyde dehydrogenase polypeptide or a functional variant thereof;
(c) a nucleic acid molecule encoding a heterologous bacterial phosphoenolpyruvate carboxylase polypeptide or a functional variant thereof; and
(d) a nucleic acid molecule encoding a heterologous bacterial pyruvate carboxylase polypeptide or a functional variant thereof;
(e) a nucleic acid molecule comprising a sequence encoding a heterologous bacterial dihydrodipicolinate synthase polypeptide or a functional variant thereof;
(f) a nucleic acid molecule comprising a sequence encoding a heterologous bacterial homoserine dehydrogenase polypeptide or a functional variant thereof;
(g) a nucleic acid molecule comprising a sequence encoding a heterologous bacterial homoserine O-acetyltransferase polypeptide or a functional variant thereof;
(h) a nucleic acid molecule comprising a sequence encoding a heterologous bacterial O-acetylhomoserine sulfhydrylase polypeptide or a functional variant thereof;
(i) a nucleic acid molecule comprising a sequence encoding a heterologous bacterial methionine adenosyltransferase polypeptide or a functional variant thereof;
(j) a nucleic acid molecule comprising a sequence encoding a heterologous bacterial mcbR gene product polypeptide or a functional variant thereof;
(k) a nucleic acid molecule comprising a sequence encoding a heterologous bacterial O-succinylhomoserine/acetylhomoserine (thiol)-lyase polypeptide or a functional variant thereof;
(l) a nucleic acid molecule comprising a sequence encoding a heterologous bacterial cystathionine beta-lyase polypeptide or a functional variant thereof;
(m) a nucleic acid molecule comprising a sequence encoding a heterologous bacterial 5-methyltetrahydrofolate homocysteine methyltransferase polypeptide or a functional variant thereof; and
(n) a nucleic acid molecule comprising a sequence encoding a heterologous bacterial 5-methyltetrahydropteroyltriglutamate-homocysteine methyltransferase polypeptide or a functional variant thereof.

14. An Escherichia coli or coryneform bacterium comprising a nucleic acid molecule comprising a sequence encoding a heterologous bacterial dihydrodipicolinate synthase polypeptide or a functional variant thereof.

15. The bacterium of claim 14 wherein the heterologous bacterial dihydrodipicolinate synthase polypeptide or a functional variant thereof is chosen from:
(a) a Mycobacterium smegmatis dihydrodipicolinate synthase polypeptide or a functional variant thereof;
(b) a Streptomyces coelicolor dihydrodipicolinate synthase polypeptide or a functional variant thereof;
(c) a Thermobifida fusca dihydrodipicolinate synthase polypeptide or a functional variant thereof; and
(d) an Erwinia chrysanthemi dihydrodipicolinate synthase polypeptide or a functional variant thereof.

16. An Escherichia coli or coryneform bacterium comprising a nucleic acid molecule comprising a sequence encoding a heterologous bacterial homoserine dehydrogenase polypeptide or a functional variant thereof.

17. The bacterium of claim 16, wherein the heterologous bacterial homoserine dehydrogenase polypeptide is chosen from:
(a) a Mycobacterium smegmatis homoserine dehydrogenase polypeptide or functional variant thereof;
(b) a Streptomyces coelicolor homoserine dehydrogenase polypeptide or a functional variant thereof;
(c) a Thermobifida fusca homoserine dehydrogenase polypeptide or a functional variant thereof; and
(d) an Erwinia chrysanthemi homoserine dehydrogenase polypeptide or a functional variant thereof.

18. An Escherichia coli or coryneform bacterium comprising a nucleic acid molecule comprising a sequence encoding a heterologous bacterial O-homoserine acetyltransferase polypeptide or a functional variant thereof.

19. The bacterium of claim 18, wherein the heterologous bacterial O-homoserine acetyltransferase polypeptide is chosen from:
(a) a Mycobacterium smegmatis O-homoserine acetyltransferase polypeptide or functional variant thereof;
(b) a Streptomyces coelicolor O-homoserine acetyltransferase polypeptide or a functional variant thereof;
(c) a Thermobifida fusca O-homoserine acetyltransferase polypeptide or a functional variant thereof; and
(d) an Erwinia chrysanthemi O-homoserine acetyltransferase polypeptide or a functional variant thereof.

20. An Escherichia coli or coryneform bacterium comprising a nucleic acid molecule that encodes a heterologous bacterial O-acetylhomoserine sulfhydrylase polypeptide or a functional variant thereof.

21. The bacterium of claim 20, wherein the heterologous bacterial O-acetylhomoserine sulfhydrolase polypeptide is chosen from:
(a) a Mycobacterium smegmatis O-acetylhomoserine sulfhydrylase polypeptide or functional variant thereof;
(b) a Streptomyces coelicolor O-acetylhomoserine sulfhydrylase polypeptide or a functional variant thereof; and
(c) a Thermobifida fusca O-acetylhomoserine sulfhydrylase polypeptide or a functional variant thereof.

22. An Escherichia coli or coryneform bacterium comprising a nucleic acid molecule comprising a sequence encoding a heterologous bacterial 5-methyltetrahydrofolate homocysteine methyltransferase polypeptide or a functional variant thereof.

23. The bacterium of claim 22, wherein the heterologous bacterial 5-methyltetrahydrofolate homocysteine methyltransferase polypeptide is chosen from:
(a) a bacterial 5-methyltetrahydrofolate homocysteine methyltransferase polypeptide that is at least 80% identical to SEQ ID No:72 or 73, or a functional variant thereof, from a species of the genus Mycobacterium;
(b) a Streptomyces coelicolor 5-methyltetrahydrofolate homocysteine methyltransferase polypeptide or a functional variant thereof
(c) a Thermobifida fusca 5-methyltetrahydrofolate homocysteine methyltransferase polypeptide or a functional variant thereof; and
(d) a Lactobacillus plantarum 5-methyltetrahydrofolate homocysteine methyltransferase polypeptide or a functional variant thereof.

24. An Escherichia coli or coryneform bacterium comprising a nucleic acid molecule comprising a sequence encoding a heterologous bacterial 5-methyltetrahydropteroyltriglutamate-homocysteine methyltransferase polypeptide or a functional variant thereof.

25. The bacterium of claim 24, wherein the heterologous bacterial 5-methyltetrahydropteroyltriglutamate-homocysteine methyltransferase polypeptide is chosen from:
(a) a bacterial 5-methyltetrahydropteroyltriglutamate-homocysteine methyltransferase polypeptide that is at least 80% identical to SEQ ID No:75 or 76, or a functional variant thereof, from a species of the genus Mycobacterium;
(b) a Streptomyces coelicolor 5-methyltetrahydropteroyltriglutamate-homocysteine methyltransferase polypeptide or a functional variant thereof;
(c) a Thermobifida fusca 5-methyltetrahydropteroyltriglutamate-homocysteine methyltransferase polypeptide or a functional variant thereof; and
(d) a Lactobacillus plantarum 5-methyltetrahydropteroyltriglutamate-homocysteine methyltransferase polypeptide or a functional variant thereof.

26. An Escherichia coli or coryneform bacterium comprising a nucleic acid molecule comprising a sequence encoding a heterologous bacterial methionine adenosyltransferase polypeptide or a functional variant thereof.

27. The bacterium of claim 26, wherein the heterologous bacterial methionine adenosyltransferase polypeptide is chosen from:
(a) a Mycobacterium smegmatis methionine adenosyltransferase polypeptide or functional variant thereof;
(b) a Streptomyces coelicolor methionine adenosyltransferase polypeptide or a functional variant thereof;
(c) a Thermobifida fusca methionine adenosyltransferase polypeptide or a functional variant thereof; and
(d) an Erwinia chrysanthemi methionine adenosyltransferase polypeptide or a functional variant thereof.

28. An Escherichia coli or coryneform bacterium comprising at least two of:
(a) a genetically altered nucleic acid molecule comprising a sequence encoding a bacterial aspartokinase polypeptide or a functional variant thereof;
(b) a genetically altered nucleic acid molecule comprising a sequence encoding a bacterial aspartate semialdehyde dehydrogenase polypeptide or a functional variant thereof;
(c) a genetically altered nucleic acid molecule comprising a sequence encoding a bacterial phosphoenolpyruvate carboxylase polypeptide or a functional variant thereof; and
(d) a genetically altered nucleic acid molecule comprising a sequence encoding a bacterial dihydrodipicolinate synthase polypeptide or a functional variant thereof.

29. The bacterium of claim 28, wherein at least one of the at least two genetically altered nucleic acid molecules encodes a heterologous polypeptide.

30. The bacterium of claim 28, wherein the bacterium comprises (a) and (b), (a) and (c), (a) and (d), (b) and (c), (b) and (d), or (c) and (d).

31. The bacterium of claim 30, wherein the bacterium comprises at least three of (a)-(e).

32. The bacterium of claim 28, wherein the bacterium has reduced activity of one or more of the following polypeptides, relative to a control:
(a) a homoserine dehydrogenase polypeptide;
(b) a homoserine kinase polypeptide; and
(c) a phosphoenolpyruvate carboxykinase polypeptide.

33. The bacterium of claim 32, wherein the bacterium comprises a mutation in an endogenous hom gene or an endogenous thrB gene.

34. The bacterium of claim 32, wherein the bacterium comprises a mutation in an endogenous hom gene and an endogeous thrB gene.

35. The bacterium of claim 32, wherein the bacterium comprises a mutation in an endogenous pck gene.

36. An Escherichia coli or coryneform bacterium comprising at least two of:
(a) a genetically altered nucleic acid molecule comprising a sequence encoding a bacterial phosphoenolpyruvate carboxylase polypeptide or a functional variant thereof;
(b) a genetically altered nucleic acid molecule comprising a sequence encoding a bacterial aspartokinase polypeptide or a functional variant thereof;
(c) a genetically altered nucleic acid molecule comprising a sequence encoding a bacterial aspartate semialdehyde dehydrogenase polypeptide or a functional variant thereof
(d) a genetically altered nucleic acid molecule comprising a sequence encoding a bacterial homoserine dehydrogenase polypeptide or a functional variant thereof;
(e) a genetically altered nucleic acid molecule comprising a sequence encoding a bacterial homoserine O-acetyltransferase polypeptide or a functional variant thereof;
(f) a genetically altered nucleic acid molecule comprising a sequence encoding a bacterial O-acetylhomoserine sulfhydrylase polypeptide or a functional variant thereof;
(g) a genetically altered nucleic acid molecule comprising a sequence encoding a bacterial 5-methyltetrahydrofolate homocysteine methyltransferase polypeptide or a functional variant thereof;
(h) a genetically altered nucleic acid molecule comprising a sequence encoding a bacterial O-succinylhomoserine (thio)-lyase polypeptide or a functional variant thereof;
(i) a genetically altered nucleic acid molecule comprising a sequence encoding a bacterial 5-methyltetrahydropteroyltriglutamate-homocysteine methyltransferase polypeptide or a functional variant thereof;
(j) a genetically altered nucleic acid molecule comprising a sequence encoding a bacterial methionine adenosyltransferase polypeptide or a functional variant thereof;
(k) a genetically altered nucleic acid molecule comprising a sequence encoding a bacterial serine hydroxylmethyltransferase polypeptide or a functional variant thereof; and
(l) a genetically altered nucleic acid molecule comprising a sequence encoding a bacterial cystathionine beta-lyase polypeptide or a functional variant thereof.

37. The bacterium of claim 36, wherein at least one of the at least two genetically altered nucleic acid molecules encodes a heterologous polypeptide.

38. The bacterium of claim 36, wherein the bacterium comprises (a) and at least one of (b), (c), (d), (e), (f), (g), (h), (i), (j), (k), and (l).

39. The bacterium of claim 36, wherein the bacterium comprises (b) and at least one of (c), (d), (e), (f), (g), (h), (i), (j), (k), and (l).

40. The bacterium of claim 36, wherein the bacterium comprises (c) and at least one of (d), (e), (f), (g), (h), (i), (j), (k), and (l).

41. The bacterium of claim 36, wherein the bacterium comprises (d) and at least one of (e), (f), (g), (h), (i), (j), (k), and (l).

42. The bacterium of claim 36, wherein the bacterium comprises (e) and at least one of (f), (g), (h), (i), (j), (k), and (l).

43. The bacterium of claim 36, wherein the bacterium comprises (f) and at least one of (g), (h), (i), (j), (k), and (l).

44. The bacterium of claim 36, wherein the bacterium comprises (g) and at least one of (h), (i), (j), (k), and (l).

45. The bacterium of claim 36, wherein the bacterium comprises (h) and at least one of (i), (j), (k), and (1).

46. The bacterium of claim 36, wherein the bacterium comprises (i) and at least one of (j) (k), and (1).

47. The bacterium of claim 36, wherein the bacterium comprises (j) and at least one of (k), and (l).

48. The bacterium of claim 36, wherein the bacterium comprises (k) and (l).

49. The bacterium of claim 36, wherein the bacterium comprises at least three of (a)-(l).

50. The bacterium of claim 36, wherein the bacterium has reduced activity of one or more of the following polypeptides, relative to a control:
(a) a homoserine kinase polypeptide;
(b) a phosphoenolpyruvate carboxykinase polypeptide;
(c) a homoserine dehydrogenase polypeptide; and
(d) a mcbR gene product polypeptide.

51. The bacterium of claim 50, wherein the bacterium comprises a mutation in an endogenous hom gene, an endogenous thrB gene, an endogenous pck gene, or an endogenous mcbR gene.

52. The bacterium of claim 50, wherein the bacterium comprises a mutation in an endogenous hom gene and an endogeous thrB gene.

53. The bacterium of claim 50, wherein the bacterium comprises a mutation in two or more of an endogenous hom gene, an endogenous thrB gene, an endogenous pck gene, or an endogenous mcbR gene.

54. An Escherichia coli or coryneform bacterium comprising at least two of:
(a) a genetically altered nucleic acid molecule comprising a sequence encoding a bacterial phosphoenolpyruvate carboxylase polypeptide or a functional variant thereof;
(b) a genetically altered nucleic acid molecule comprising a sequence encoding a bacterial aspartokinase polypeptide or a functional variant thereof;
(c) a genetically altered nucleic acid molecule comprising a sequence encoding a bacterial aspartate semialdehyde dehydrogenase polypeptide or a functional variant thereof;
(d) a genetically altered nucleic acid molecule comprising a sequence encoding a bacterial homoserine dehydrogenase polypeptide or a functional variant thereof.

55. The bacterium of claim 54, wherein at least one of the at least two polypeptides encodes a heterologous polypeptide.

56. The bacterium of claim 54, wherein the bacterium comprises (a) and (b), (a) and (c), (a) and (d), (b) and (c), (b) and (d), or (c) and (d).

57. The bacterium of claim 54, wherein the bacterium comprises at least three of (a)-(d).

58. The bacterium of claim 54, wherein the bacterium has reduced activity of one or more of the following polypeptides, relative to a control:
(a) a phosphoenolpyruvate carboxykinase polypeptide; and
(b) a mcbR gene product polypeptide.

59. The bacterium of claim 58, wherein the bacterium comprises a mutation in an endogenous pck gene or an endogenous mcbR gene.

60. The bacterium of claim 58, wherein the bacterium comprises a mutation in an endogenous pck gene and an endogenous mcbR gene.

61. A method of producing an amino acid or a related metabolite, the method comprising:
cultivating a bacterium according to claim 1 under conditions that allow the amino acid the metabolite to be produced, and collecting a composition that comprises the amino acid or related metabolite from the culture.

62. The method of claim 61, further comprising fractionating at least a portion of the culture to obtain a fraction enriched in the amino acid or the metabolite.

63. A method for producing L-lysine or a related metabolite, the method comprising:
cultivating a bacterium according to claim 1 or 28 under conditions that allow L-lysine to be produced, and collecting a composition that comprises the amino acid or related metabolite from the culture.

64. The method of claim 63, further comprising fractionating at least a portion of the culture to obtain a fraction enriched in L-lysine.

65. A method for producing methionine or S-adenosylmethionine, the method comprising:
cultivating a bacterium according to claim 36 under conditions that allow methionine or S-adenosylmethionine to be produced, and collecting a composition that comprises the methionine or S-adenosylmethionine from the culture.

66. The method of claim 65, further comprising fractionating at least a portion of the culture to obtain a fraction enriched in methionine or S-adenosylmethionine.

67. A method for producing isoleucine or threonine, the method comprising:
cultivating a bacterium according to claim 54 under conditions that allow isoleucine or threonine to be produced, and collecting a composition that comprises the a isoleucine or threonine from the culture.

68. The method of claim 67, further comprising fractionating at least a portion of the culture to obtain a fraction enriched in isoleucine or threonine.

69. An isolated nucleic acid encoding a variant bacterial protein, wherein the bacterial protein regulates the production of an amino acid from the aspartic acid family of amino acids or related metabolites, and wherein the variant protein has enhanced activity, relative to a wild type form of the protein

70. The nucleic acid of claim 69, wherein the bacterial protein regulates the production of an amino acid from the aspartic acid family of amino acids or related metabolites, and wherein the variant protein has reduced feedback inhibition by S-adenosylmethionine relative to a wild type form of the protein.

71. An isolated nucleic acid encoding a variant of a bacterial protein, wherein the bacterial protein comprises the following amino acid sequence:
(SEQ ID NO:360)
G₁-X₂-K₃-X₄-X₅-X₆-X₇-X₈-X₉-X₁₀-X₁₁-X₁₂-X₁₃-X₁₃ₐ-
X_{13b}-X_{13c}-X_{13d}-X₁₃ₑ-X_{13f}-X_{13g}-X₁₃ₕ-X₁₃ᵢ-X₁₃ⱼ-X₁₃ₖ-
X₁₃ₗ-F₁₄-X₁₅-Z₁₆-X₁₇-X₁₈-X₁₉-X₂₀-X₂₁-X₂₁ₐ-X_{21b}-
X_{21c}-X_{21d}-X₂₁ₑ-X_{21f}-X_{21g}-X₂₁ₕ-X₂₁ᵢ-X₂₁ⱼ-X₂₁ₖ-X₂₁ₗ-
X₂₁ₘ-X₂₁ₙ-X₂₁ₒ-X₂₁ₚ-X_{21q}-X₂₁ᵣ-X₂₁ₛ-X₂₁ₜ-D_{22,}
wherein each of X₂, X₄—X₁₃, X₁₅, and X₁₇—X₂₀ is, independently, any amino acid, wherein each of X₁₃ₐ—X₁₃ₗ is, independently, any amino acid or absent, wherein each of X₂₁ₐ—X₂₁ₜ is, independently, any amino acid or absent, and wherein Z₁₆ is selected from valine, aspartate, glycine, isoleucine, and leucine;
wherein the variant bacterial protein comprises an amino acid change at one or more of G₁, K₃, F₁₄, Z₁₆, or D₂₂ of SEQ ID NO:360).

72. The nucleic acid of claim 71, wherein feedback inhibition of the variant of the bacterial protein by S-adenosylmethionine is reduced relative to the bacterial protein.

73. The nucleic acid of claim 71, wherein the amino acid change is a change to an alanine.

74. A polypeptide encoded by the nucleic acid of claim 69.

75. A polypeptide encoded by the nucleic acid of claim 71.

76. A bacterium comprising the nucleic acid of claim 69.

77. A bacterium comprising the nucleic acid of claim 71.

78. A method for producing an amino acid or a related metabolite, the method comprising:
cultivating a genetically modified bacterium comprising the nucleic acid of claim 69 under conditions in which the nucleic acid is expressed and that allow the amino acid to be produced, and collecting a composition that comprises the amino acid or related metabolite from the culture.

79. A method for producing an amino acid or a related metabolite, the method comprising:
cultivating a genetically modified bacterium comprising the nucleic acid of claim 71 under conditions in which the nucleic acid is expressed and that allow the amino acid to be produced, and collecting a composition that comprises the amino acid or related metabolite from the culture.

80. An isolated nucleic acid encoding a variant bacterial homoserine O-acetyltransferase, wherein the variant homoserine O-acetyltransferase is a variant of a homoserine O-acetyltransferase comprising the following amino acid sequence:
(SEQ ID NO:360)
G₁-X₂-K₃-X₄-X₅-X₆-X₇-X₈-X₉-X₁₀-X₁₁-X₁₂-X₁₃-X₁₃ₐ-
X_{13b}-X_{13c}-X_{13d}-X₁₃ₑ-X_{13f}-X_{13g}-X₁₃ₕ-X₁₃ᵢ-X₁₃ⱼ-X₁₃ₖ-
X₁₃ₗ-F₁₄-X₁₅-Z₁₆-X₁₇-X₁₈-X₁₉-X₂₀-X₂₁-X₂₁ₐ-X_{21b}-
X_{21c}-X_{21d}-X₂₁ₑ-X_{21f}-X_{21g}-X₂₁ₕ-X₂₁ᵢ-X₂₁ⱼ-X₂₁ₖ-X₂₁ₗ-
X₂₁ₘ-X₂₁ₙ-X₂₁ₒ-X₂₁ₚ-X_{21q}-X₂₁ᵣ-X₂₁ₛ-X₂₁ₜ-D_{22,}
wherein each of X₂, X₄—X₁₃, X₁₅, and X₁₇—X₂₀ is, independently, any amino acid, wherein each of X₁₃ₐ—X₁₃ₗ is, independently, any amino acid or absent, wherein each of X₂₁ₐ—X₂₁ₜ is, independently, any amino acid or absent, and wherein Z₁₆ is selected from valine, aspartate, glycine, isoleucine, and leucine;
wherein the variant homoserine O-acetyltransferase comprises an amino acid change at one or more of G₁, K₃, F₁₄, Z₁₆, or D₂₂ of SEQ ID NO:360.

81. An isolated nucleic acid encoding a variant bacterial O-acetylhomoserine sulfhydrylase, wherein the variant O-acetylhomoserine sulfhydrylase is a variant of an O-acetylhomoserine sulfhydrylase comprising the following amino acid sequence:
(SEQ ID NO:360)
G₁-X₂-K₃-X₄-X₅-X₆-X₇-X₈-X₉-X₁₀-X₁₁-X₁₂-X₁₃-X₁₃ₐ-
X_{13b}-X_{13c}-X_{13d}-X₁₃ₑ-X_{13f}-X_{13g}-X₁₃ₕ-X₁₃ᵢ-X₁₃ⱼ-X₁₃ₖ-
X₁₃ₗ-F₁₄-X₁₅-Z₁₆-X₁₇-X₁₈-X₁₉-X₂₀-X₂₁-X₂₁ₐ-X_{21b}-
X_{21c}-X_{21d}-X₂₁ₑ-X_{21f}-X_{21g}-X₂₁ₕ-X₂₁ᵢ-X₂₁ⱼ-X₂₁ₖ-X₂₁ₗ-
X₂₁ₘ-X₂₁ₙ-X₂₁ₒ-X₂₁ₚ-X_{21q}-X₂₁ᵣ-X₂₁ₛ-X₂₁ₜ-D_{22,}
wherein X is any amino acid, wherein each of X₁₃ₐ—X₁₃ₗ is, independently, any amino acid or absent, wherein each of X₂₁ₐ—X₂₁ₜ is, independently, any amino acid or absent, and wherein Z₁₆ is selected from valine, aspartate, glycine, isoleucine, and leucine;
wherein the variant O-acetylhomoserine sulfhydrylase comprises an amino acid change at one or more of G₁, K₃, F₁₄, Z₁₆, or D₂₂ of SEQ ID NO:360.

82. An isolated nucleic acid encoding a variant bacterial mcbR gene product, wherein the variant mcbR gene product is a variant of an mcbR gene product comprising the following amino acid sequence:
(SEQ ID NO:360)
G₁-X₂-K₃-X₄-X₅-X₆-X₇-X₈-X₉-X₁₀-X₁₁-X₁₂-X₁₃-X₁₃ₐ-
X_{13b}-X_{13c}-X_{13d}-X₁₃ₑ-X_{13f}-X_{13g}-X₁₃ₕ-X₁₃ᵢ-X₁₃ⱼ-X₁₃ₖ-
X₁₃ₗ-F₁₄-X₁₅-Z₁₆-X₁₇-X₁₈-X₁₉-X₂₀-X₂₁-X₂₁ₐ-X_{21b}-
X_{21c}-X_{21d}-X₂₁ₑ-X_{21f}-X_{21g}-X₂₁ₕ-X₂₁ᵢ-X₂₁ⱼ-X₂₁ₖ-X₂₁ₗ-
X₂₁ₘ-X₂₁ₙ-X₂₁ₒ-X₂₁ₚ-X_{21q}-X₂₁ᵣ-X₂₁ₛ-X₂₁ₜ-D_{22,}
wherein each of X₂, X₄—X₁₃, X₁₅, and X₁₇—X₂₀ is, independently, any amino acid, wherein each of X₁₃ₐ—X₁₃ₗ is, independently, any amino acid or absent, wherein each of X₂₁ₐ—X₂₁ₜ is, independently, any amino acid or absent, and wherein Z₁₆ is selected from valine, aspartate, glycine, isoleucine, and leucine;
wherein the variant mcbR gene product comprises an amino acid change at one or more of G₁, K₃, F₁₄, Z₁₆, or D₂₂ of SEQ ID NO:360

83. An isolated nucleic acid encoding a variant bacterial aspartokinase, wherein the variant aspartokinase is a variant of an aspartokinase comprising the following amino acid sequence:
(SEQ ID NO:360)
G₁-X₂-K₃-X₄-X₅-X₆-X₇-X₈-X₉-X₁₀-X₁₁-X₁₂-X₁₃-X₁₃ₐ-
X_{13b}-X_{13c}-X_{13d}-X₁₃ₑ-X_{13f}-X_{13g}-X₁₃ₕ-X₁₃ᵢ-X₁₃ⱼ-X₁₃ₖ-
X₁₃ₗ-F₁₄-X₁₅-Z₁₆-X₁₇-X₁₈-X₁₉-X₂₀-X₂₁-X₂₁ₐ-X_{21b}-
X_{21c}-X_{21d}-X₂₁ₑ-X_{21f}-X_{21g}-X₂₁ₕ-X₂₁ᵢ-X₂₁ⱼ-X₂₁ₖ-X₂₁ₗ-
X₂₁ₘ-X₂₁ₙ-X₂₁ₒ-X₂₁ₚ-X_{21q}-X₂₁ᵣ-X₂₁ₛ-X₂₁ₜ-D_{22,}
wherein each of X₂, X₄—X₁₃, X₁₅, and X₁₇—X₂₀ is, independently, any amino acid, wherein each of X₁₃ₐ—X₁₃ₗ is, independently, any amino acid or absent, wherein each of X₂₁ₐ—-X₂₁ₜ is, independently, any amino acid or absent, and wherein Z₁₆ is selected from valine, aspartate, glycine, isoleucine, and leucine;
wherein the variant aspartokinase comprises an amino acid change at one or more of G₁, K₃, F₁₄, Z₁₆, or D₂₂ of SEQ ID NO:360.

84. An isolated nucleic acid encoding a variant bacterial O-succinylhomoserine (thiol)-lyase, wherein the variant O-succinylhomoserine (thiol)-lyase is a variant of an O-succinylhomoserine (thiol)-lyase comprising the following amino acid sequence:
(SEQ ID NO:360)
G₁-X₂-K₃-X₄-X₅-X₆-X₇-X₈-X₉-X₁₀-X₁₁-X₁₂-X₁₃-X₁₃ₐ-
X_{13b}-X_{13c}-X_{13d}-X₁₃ₑ-X_{13f}-X_{13g}-X₁₃ₕ-X₁₃ᵢ-X₁₃ⱼ-X₁₃ₖ-
X₁₃ₗ-F₁₄-X₁₅-Z₁₆-X₁₇-X₁₈-X₁₉-X₂₀-X₂₁-X₂₁ₐ-X_{21b}-
X_{21c}-X_{21d}-X₂₁ₑ-X_{21f}-X_{21g}-X₂₁ₕ-X₂₁ᵢ-X₂₁ⱼ-X₂₁ₖ-X₂₁ₗ-
X₂₁ₘ-X₂₁ₙ-X₂₁ₒ-X₂₁ₚ-X_{21q}-X₂₁ᵣ-X₂₁ₛ-X₂₁ₜ-D_{22,}
wherein each of X₂, X₄—X₁₃, X₁₅, and X₁₇—X₂₀ is, independently, any amino acid, wherein each of X₁₃ₐ—X₁₃ₗ is, independently, any amino acid or absent, wherein each of X₂₁ₐ—X₂₁ₜ is, independently, any amino acid or absent, and wherein Z₁₆ is selected from valine, aspartate, glycine, isoleucine, and leucine;
wherein the variant O-succinylhomoserine (thiol)-lyase comprises an amino acid change at one or more of G₁, K₃, F₁₄, Z₁₆, or D₂₂ of SEQ ID NO:360.

85. An isolated nucleic acid encoding a variant bacterial cystathionine beta-lyase, wherein the variant cystathionine beta-lyase is a variant of a cystathionine beta-lyase comprising the following amino acid sequence:
(SEQ ID NO:360)
G₁-X₂-K₃-X₄-X₅-X₆-X₇-X₈-X₉-X₁₀-X₁₁-X₁₂-X₁₃-X₁₃ₐ-
X_{13b}-X_{13c}-X_{13d}-X₁₃ₑ-X_{13f}-X_{13g}-X₁₃ₕ-X₁₃ᵢ-X₁₃ⱼ-X₁₃ₖ-
X₁₃ₗ-F₁₄-X₁₅-Z₁₆-X₁₇-X₁₈-X₁₉-X₂₀-X₂₁-X₂₁ₐ-X_{21b}-
X_{21c}-X_{21d}-X₂₁ₑ-X_{21f}-X_{21g}-X₂₁ₕ-X₂₁ᵢ-X₂₁ⱼ-X₂₁ₖ-X₂₁ₗ-
X₂₁ₘ-X₂₁ₙ-X₂₁ₒ-X₂₁ₚ-X_{21q}-X₂₁ᵣ-X₂₁ₛ-X₂₁ₜ-D_{22,}
wherein each of X₂, X₄—X₁₃, X₁₅, and X₁₇—X₂₀ is, independently, any amino acid, wherein each of X₁₃ₐ—X₁₃ₗ is, independently, any amino acid or absent, wherein each of X₂₁ₐ—X₂₁ₜ is, independently, any amino acid or absent, and wherein Z₁₆ is selected from valine, aspartate, glycine, isoleucine, and leucine;
wherein the variant cystathionine beta-lyase comprises an amino acid change at one or more of G₁, K₃, F₁₄, Z₁₆, or D₂₂ of SEQ ID NO:360.

86. An isolated nucleic acid encoding a variant bacterial 5-methyltetrahydrofolate homocysteine methyltransferase, wherein the variant 5-methyltetrahydrofolate homocysteine methyltransferase is a variant of a 5-methyltetrahydrofolate homocysteine methyltransferase comprising the following amino acid sequence:
(SEQ ID NO:362)
G₁-X₂-K₃-X₄-X₅-X₆-X₇-X₈-X₉-X₁₀-X₁₁-X₁₂-X₁₃-X₁₃ₐ-
X_{13b}-X_{13c}-X_{13d}-X₁₃ₑ-X_{13f}-X_{13g}-X₁₃ₕ-X₁₃ᵢ-X₁₃ⱼ-X₁₃ₖ-
X₁₃ₗ-F₁₄-X₁₅-Z₁₆
wherein each of X₂, X₄—X₁₃, X₁₅, and X₁₅—X₁₆ is, independently,wherein X is any amino acid, wherein each of X_{13a—X}₁₃ₗ is, independently, any amino acid or absent, and wherein Z₁₆ is selected from valine, aspartate, glycine, isoleucine, and leucine;
wherein the variant homocysteine methyltransferase comprises an amino acid change at one or more of G₁, K₃, F₁₄, or Z₁₆, of SEQ ID NO:362.

87. An isolated nucleic acid encoding a variant bacterial S-adenosylmethionine synthetase, wherein the variant S-adenosylmethionine synthetase is a variant of an S-adenosylmethionine synthetase comprising the following amino acid sequence:
(SEQ ID NO:360)
G₁-X₂-K₃-X₄-X₅-X₆-X₇-X₈-X₉-X₁₀-X₁₁-X₁₂-X₁₃-X₁₃ₐ-
X_{13b}-X_{13c}-X_{13d}-X₁₃ₑ-X_{13f}-X_{13g}-X₁₃ₕ-X₁₃ᵢ-X₁₃ⱼ-X₁₃ₖ-
X₁₃ₗ-F₁₄-X₁₅-Z₁₆-X₁₇-X₁₈-X₁₉-X₂₀-X₂₁-X₂₁ₐ-X_{21b}-
X_{21c}-X_{21d}-X₂₁ₑ-X_{21f}-X_{21g}-X₂₁ₕ-X₂₁ᵢ-X₂₁ⱼ-X₂₁ₖ-X₂₁ₗ-
X₂₁ₘ-X₂₁ₙ-X₂₁ₒ-X₂₁ₚ-X_{21q}-X₂₁ᵣ-X₂₁ₛ-X₂₁ₜ-D_{22,}
wherein each of X₂, X₄—X₁₃, X₁₅, and X₁₇—X₂₀ is, independently, any amino acid, wherein each of X₁₃ₐ—X₁₃ₗ is, independently, any amino acid or absent, wherein each of X₂₁ₐ—X₂₁ₜ is, independently, any amino acid or absent, and wherein Z₁₆ is selected from valine, aspartate, glycine, isoleucine, and leucine;
wherein the variant S-adenosylmethionine synthetase comprises an amino acid change at one or more of G₁, K₃, F₁₄, Z₁₆, or D₂₂ of SEQ ID NO:360.

88. A bacterium comprising two or more of the following:
a nucleic acid encoding a variant bacterial homoserine O-acetyltransferase with reduced feedback inhibition relative to a wild-type form of the homoserine O-acetyltransferase;
a nucleic acid encoding a variant bacterial O-acetylhomoserine sulfhydrylase with reduced feedback inhibition relative to a wild-type form of the O-acetylhomoserine sulfhydrylase;
a nucleic acid encoding a variant bacterial McbR gene product with reduced feedback inhibition relative to a wild-type form of the McbR gene product;
a nucleic acid encoding a variant bacterial aspartokinase with reduced feedback inhibition relative to a wild-type form of the aspartokinase;
a nucleic acid encoding a variant bacterial O-succinylhomoserine (thiol)-lyase with reduced feedback inhibition relative to a wild-type form of the O-succinylhomoserine (thiol)-lyase;
a nucleic acid encoding a variant bacterial cystathionine beta-lyase with reduced feedback inhibition relative to a wild-type form of the cystathionine beta-lyase;
a nucleic acid encoding a variant bacterial homocysteine methyltransferase with reduced feedback inhibition relative to a wild-type form of the 5-methyltetrahydrofolate homocysteine methyltransferase; and
a nucleic acid encoding a variant bacterial S-adenosylmethionine synthetase with reduced feedback inhibition relative to a wild-type form of the S-adenosylmethionine synthetase.

89. A bacterium comprising two or more of the following:
(a) a nucleic acid encoding a variant bacterial homoserine O-acetyltransferase, wherein the variant homoserine O-acetyltransferase is a variant of a homoserine O-acetyltransferase comprising the following amino acid sequence:
(SEQ ID NO:360)
G₁-X₂-K₃-X₄-X₅-X₆-X₇-X₈-X₉-X₁₀-X₁₁-X₁₂-X₁₃-X₁₃ₐ-
X_{13b}-X_{13c}-X_{13d}-X₁₃ₑ-X_{13f}-X_{13g}-X₁₃ₕ-X₁₃ᵢ-X₁₃ⱼ-X₁₃ₖ-
X₁₃ₗ-F₁₄-X₁₅-Z₁₆-X₁₇-X₁₈-X₁₉-X₂₀-X₂₁-X₂₁ₐ-X_{21b}-
X_{21c}-X_{21d}-X₂₁ₑ-X_{21f}-X_{21g}-X₂₁ₕ-X₂₁ᵢ-X₂₁ⱼ-X₂₁ₖ-X₂₁ₗ-
X₂₁ₘ-X₂₁ₙ-X₂₁ₒ-X₂₁ₚ-X_{21q}-X₂₁ᵣ-X₂₁ₛ-X₂₁ₜ-D_{22,}
wherein each of X₂, X₄—X₁₃, X₁₅, and X₁₇—X₂₀ is, independently, any amino acid, wherein each of X₁₃ₐ—X₁₃ₗ is, independently, any amino acid or absent, wherein each of X₂₁ₐ—X₂₁ₜ is, independently, any amino acid or absent, and wherein Z₁₆ is selected from valine, aspartate, glycine, isoleucine, and leucine;
wherein the variant homoserine O-acetyltransferase comprises an amino acid change at one or more of G₁, K₃, F₁₄, Z₁₆, or D₂₂ of SEQ ID NO:360;
(b) a nucleic acid encoding a variant bacterial O-acetylhomoserine sulfhydrylase, wherein the variant O-acetylhomoserine sulfhydrylase is a variant of an O-acetylhomoserine sulfhydrylase comprising the following amino acid sequence:
(SEQ ID NO:360)
G₁-X₂K₃-X₄-X₅-X₆-X₇-X₈-X₉-X₁₀-X₁₁-X₁₂-X₁₃-X₁₃ₐ-
X_{13b}-X_{13c}-X_{13d}-X₁₃ₑ-X_{13f}-X_{13g}-X₁₃ₕ-X₁₃ᵢ-X₁₃ⱼ-
X₁₃ₖ-X₁₃ₗ-F₁₄-X₁₅-Z₁₆-X₁₇-X₁₈-X₁₉-X₂₀-X₂₁-X₂₁ₐ-
X_{21b}-X_{21c}-X_{21d}-X₂₁ₑ-X_{21f}-X_{21g}-X₂₁ₕ-X₂₁ᵢ-X₂₁ⱼ-X₂₁ₖ-
X₂₁ₗ-X₂₁ₘ-X₂₁ₙ-X₂₁ₒ-X₂₁ₚ-X_{21q}-X₂₁ᵣ-X₂₁ₛ-X₂₁ₜ-D_{22,}
wherein each of X₂, X₄—X₁₃, X₁₅, and X₁₇—X₂₀ is, independently, any amino acid, wherein each of X₁₃ₐ—X₁₃ₗ is, independently, any amino acid or absent, wherein each of X₂₁ₐ—X₂₁ₜ is, independently, any amino acid or absent, and wherein Z₁₆ is selected from valine, aspartate, glycine, isoleucine, and leucine;
wherein the variant O-acetylhomoserine sulfhydrylase comprises an amino acid change at one or more of G₁, K₃, F₁₄, Z₁₆, or D₂₂ of SEQ ID NO:360; and
(c) a nucleic acid encoding a variant bacterial O-acetylhomoserine sulfhydrylase, wherein the variant O-acetylhomoserine sulfhydrylase is a variant of a O-acetylhomoserine sulfhydrylase comprising the following amino acid sequence:
L₁-X₂—X₃-G₄-G₅-X₆—F₇—X₈—X₉—X₁₀—X₁₁ (SEQ ID NO:361), wherein X is any amino acid, wherein X₈ is selected from valine, leucine, isoleucine, and aspartate, and wherein X₁₁ is selected from valine, leucine, isoleucine, phenylalanine, and methionine; wherein the variant of the bacterial protein comprises an amino acid change at one or more of L₁, G₄, X₈, X₁₁ of SEQ ID NO:361.

90. A bacterium comprising two or more of the following:
(a) a nucleic acid encoding a variant bacterial homoserine O-acetyltransferase, wherein the variant homoserine O-acetyltransferase is a C. glutamicum homoserine O-acetyltransferase comprising an amino acid change in one or more of the following residues of SEQ ID NO:212 Glycine 231, Lysine 233, Phenylalanine 251, and Valine 253;
(b) a nucleic acid encoding a variant bacterial homoserine O-acetyltransferase, wherein the variant homoserine O-acetyltransferase is a T. fusca homoserine O-acetyltransferase comprising an amino acid change in one or more of the following residues of SEQ ID NO:24: Glycine 81, Aspartate 287, Phenylalanine 269;
(c) a nucleic acid encoding a variant bacterial homoserine O-acetyltransferase, wherein the variant homoserine O-acetyltransferase is an E. coli homoserine O-acetyltransferase comprising an amino acid change at Glutamate 252 of SEQ ID NO:213;
(d) a nucleic acid encoding a variant bacterial homoserine O-acetyltransferase, wherein the variant homoserine O-acetyltransferase is a mycobacterial homoserine O-acetyltransferase comprising an amino acid change in a residue corresponding to one or more of the following residues of M. leprae homoserine O-acetyltransferase set forth in SEQ ID NO: 23: Glycine 73, Aspartate 278, and Tyrosine 260;
(e) a nucleic acid encoding a variant bacterial homoserine O-acetyltransferase, wherein the variant homoserine O-acetyltransferase is an M. tuberculosis homoserine O-acetyltransferase comprising an amino acid change in one or more of the following residues of SEQ ID NO:22: Glycine 73, Tyrosine 260, and Aspartate 278;
(f) a nucleic acid encoding a variant bacterial O-acetylhomoserine sulfhydrylase, wherein the variant O-acetylhomoserine sulfhydrylase is a C. glutamicum O-acetylhomoserine sulfhydrylase comprising an amino acid change in one or more of the following residues of SEQ ID NO:214: Glycine 227, Leucine 229, Aspartate 231, Glycine 232, Glycine 233, Phenylalanine 235, Aspartate 236, Valine 239, Phenylalanine 368, Aspartate 370, Aspartate 383, Glycine 346, and Lycine 348; and
(g) a nucleic acid encoding a variant bacterial O-acetylhomoserine sulfhydrylase, wherein the variant O-acetylhomoserine sulfhydrylase is a T. fusca O-acetylhomoserine sulfhydrylase comprising an amino acid change in one or more of the following residues of SEQ ID NO:25: Glycine 240, Aspartate 244, Phenylalanine 379, and Aspartate 394.

91. A bacterium comprising a nucleic acid encoding an episomal homoserine O-acetyltransferase, or a variant thereof, and an episomal O-acetylhomoserine sulfhydrylase, or a variant thereof.

92. The bacterium of claim 91, wherein the episomal homoserine O-acetyltransferase and the episomal O-acetylhomoserine sulfhydrylase are of a different species than the bacterium.

93. A method for the preparation of animal feed additives containing an aspartate-derived amino acid(s) comprising:
(a) cultivating a bacterium according to any of claims 1, 28, 36, and 54 under conditions that allow the aspartate-derived amino acid(s) to be produced;
(b) collecting a composition that comprises at least a portion of the aspartate-derived amino acid(s) that result from cultivating said bacterium;
(c) concentrating the collected composition to enrich for the aspartate-derived amino acid(s); and
(d) optionally, adding one or more substances to obtain the desired animal feed additive.

94. The method of claim 93, wherein the bacterium is Escherichia coli or a coryneform bacterium.

95. The method of claim 94, wherein the bacterium is Corynebacterium glutamicum.

96. The method of claim 93, wherein the aspartate-derived amino acid one or more of lysine, methionine, threonine or isoleucine.

The application's sequence listing, which the Patent Office published only in electronic form, follows.

SEQUENCE LISTING (364 sequences)

SEQ ID NO: 1 - protein, 421 aa, Mycobacterium smegmatis
MALVVQKYGGSSVADAERIRRVAERIVETKKAGNDVVVVVSAMGDTTDDLLDLARQVSPAPPPREMDMLLTAGERISNALVAMAIESLGAQARSFTGSQAGVITTGTHGNAKIIDVTPGRLRDALDEGQIVLVAGFQGVSQDSKDVTTLGRGGSDTTAVAVAAALDADVCEIYTDVDGIFTADPRIVPNARHLDTVSFEEMLEMAACGAKVLMLRCVEYARRYNVPIHVRSSYSDKPGTIVKGSIEDIPMEDAILTGVAHDRSEAKVTVVGLPDVPGYAAKVFRAVAEADVNIDMVLQNISKIEDGKTDITFTCARDNGPRAVEKLSALKSEIGFSQVLYDDHIGKVSLIGAGMRSHPGVTATFCEALAEAGINIDLISTSEIRISVLIKDTELDKAVSALHEAFGLGGDDEAVVYAGTGR

SEQ ID NO: 2 - protein, 421 aa, Amycolatopsis mediterranei
MALVVQKYGGSSLESADRIKRVAERIVATKKAGNDVVVVCSAMGDTTDELLDLAQQVNPAPPEREMDMLLTAGERISNSLVAMAIAAQGAEAWSFTGSQAGVVTTSVHGNARIIDVTPSRVTEALDQGYIALVAGFQGVAQDTKDITTLGRGGSDTTAVALAAALNADVCEIYSDVDGVYTADPRVVPDAKKLDTVTYEEMLELAASGSKILHLRSVEYARRYGVPIRVRSSYSDKPGTTVTGSIEEIPVEQALITGVAHDRSEAKITVTGVPDHTGAAARIFRVIADAEIDIDMVLQNVSSTVSGRTDITFTLSKANGAKAVKELEKVQAEIGFESVLYDDHVGKVSVVGAGMRSHPGVTATFCEALAEAGVNIEIINTSEIRISVLIRDAQLDDAVRAIHEAFELGGDEEAVVYAGSGR

SEQ ID NO: 3 - protein, 425 aa, Streptomyces coelicolor
MGLVVQKYGGSSVADAEGIKRVAKRIVEAKKNGNQVVAVVSAMGDTTDELIDLAEQVSPIPAGRELDMLLTAGERISMALLAMAIKNLGHEAQSFTGSQAGVITDSVHNKARIIDVTPGRIRTSVDEGNVAIVAGFQGVSQDSKDITTLGRGGSDTTAVALAAALDADVCEIYTDVDGVFTADPRVVPKAKKIDWISFEDMLELAASGSKVLLHRCVEYARRYNIPIHVRSSFSGLQGTWVSSEPIKQGEKHVEQALISGVAHDTSEAKVTVVGVPDKPGEAAAIFRAIADAQVNIDMVVQNVSAASTGLTDISFTLPKSEGRKAIDALEKNRPGIGFDSLRYDDQIGKISLVGAGMKSNPGVTADFFTALSDAGVNIELISTSEIRISVVTRKDDVNEAVRAVHTAFGLDSDSDEAVVYGGTGR

SEQ ID NO: 4 - protein, 445 aa, Thermobifida fusca
MNLRSLDWLVDYREPDSSGAPTVALIVQKYGGSSVADADAIKRVAERIVAQKKAGYDVVVVVSAMGDTTDELLDLAKQVSPLPPGRELDMLLTAGERISMALVAMAIGNLGYEARSFTGSQAGVITTSLHGNAKIIDVTPGRIRDALAEGAICIVAGFQGVSQDSKDITTLGRGGSDTTAVALAAALNADLCEIYTDVDGVFTADPRIVPSARRIPQISYEEMLEMAASGAKILHLRCVEYARRYNIPLHVRSSFSQKPGTWVVSEVEETEGMEQPIISGVAHDRSEAKITVVGVPDRVGEAAAIFKALADAEINVDMIVQNVSAASTSRTDISFTLPADSGQNALAALKKIQDKVGFESLLYNDRIGKVSLIGAGMRSYPGVTARFFDAVAREGINIEMISTSEIRISIVVAQDDVDAAVAAAHREFQLDADQVEAVVYGGTGR

SEQ ID NO: 5 - protein, 454 aa, Erwinia chrysanthemi
MSANTDNSLIIAKFGGTSVADFDAMNRSADIVLSDAQVRVVVLSASAGVTNLLVALAEGLPPSERTAQLEKLRQIQYAIIDRLNQPAVIREEIDRMLDNVARLSEAAALATSNALTDELVSHGELISTLLFVEILRERNVAAEWFDVRKIMRTNDRFGRAEPDCDALGELTRSQLTPRLAQGLIITQGFIGSEAKGRTTTLGRGGSDYTAALLGEALHASRIDIWTDVPGIYTTDPRVVPSAHRIDQITFEEAAEMATFGAKVLHPATLLPAVRSDIPVFVGSSKDPAAGGTLVCNNTENPPLFRALALRRKQTLLTLHSLNMLHARGFLAEVFSILARHNISVDLITTSEVNVALTLDTTGSTSTGDSLLSSALLTELSSLCRVEVEENMSLVALIGNQLSQACGVGKEVFGVLEPFNIRLICYGASSHNLCFLVPSSDAEQVVQTLHHNLFE

SEQ ID NO: 6 - protein, 418 aa, Shewanella oneidensis
MLEKRKLSGSKLFVKKFGGTSVGSIERIEVVAEQIAKSAHSGEQQVLVLSAMAGETNRLFALAAQIDPRASARELDMLVSTGEQISIALMAMALQRRGIKARSLTGDQVQIHTNSQFGRASIESVDTAYLTSLLEQGIVPIVAGFQGIDPNGDVTTLGRGGSDTTAVALAAALRADECQIFTDVSGVFTTDPNIDSSARRLDVIGFDVMLEMAKLGAKVLHPDSVEYAQRFKVPLRVLSSFEAGQGTLIQFGDESELAMAASVQGIAINKALATLTIEGLFTSSERYQALLACLARLEVDVEFITPLKLNEISPVESVSFMLAEAKVDILLHELEVLSESLDLGQLIVERQRAKVSLVGKGLQAKVGLLTKMLDVLGNETIHAKLLSTSESKLSTVIDERDLHKAVRALHHAFELNKV

SEQ ID NO: 7 - protein, 875 aa, Thermobifida fusca
MTRDSARQEMPDQLRRDVRLLGEMLGTVLAESGGQDLLDDVERLRRAVIGAREGTVEGKEITELVASWPLERAKQVARAFTVYFHLVNLAEEHHRMRALRERDDAATPQRESLAAAVHSIREDAGPERLRELIAGMEFHPVLTAHPTEARRRAVSTAIQRISAQLERLHAAHPGSGAEAEARRRLLEEIDLLWRTSQLRYTKMDPLDEVRTAMAAFDETIFTVIPEVYRSLDRALDPEGCGRRPALAKAFVRYGSWIGGDRDGNPFVTHEVTREAITIQSEHVLRALENACERIGRTHTEYTGLTPPSAELRAALSSARAAYPRLMQEIIKRSPNEPHRQLLLLAAERLRATRLRNADLGYPNPEAFLADLRTVQESLAAAGAVRQAYGELQNLIWQAETFGFHLAELEIRQHSAVHAAALKEIRAGGELSERTEEVLATLRVVAWIQERFGVEACRRYIVSFTQSADDIAAVYELAEHAMPPGKAPILDVIPLFETGADLDAAPQVLDGMLRLPAVQRRLEQTGRRMEVMLGYSDSAKDVGPVSATLRLYDAQARLAEWAREHDIKLTLFHGRGGALGRGGGPANRAVLAQAPGSVDGRFKVTEQGEVIFARYGQRAIAHRHIEQVGHAVLMASTESVQRRAAEAAARFRGMADRIAEAAHAAYRALVDTEGFAEWFSRVSPLEELSELRLGSRPARRSAARGLDDLRAIPWVFAWTQTRVNLPGWYGLGSGLAAVDDLEALHTAYKEWPLFASLLDNAEMSLAKTDRVIAERYLALGGRPELTEQVLAEYDRTRELVLKVTRHTRLLENRRVLSRAVDLRNPYVDALSHLQLRALEALRTGEADRLSEEDRNHLERLLLLSVNGVAAGLQNTG

SEQ ID NO: 8 - protein, 934 aa, Mycobacterium leprae
MVEFSDAILEPIGAVQRTRVGREATEPMRADIRLLGTILGDTLREQNGDEVFDLVERVRVESFRVRRSEIDRADMARMFSGLDIHLAIPIIRAFSHFALLANVAEDIHRERRRHIHLDAGEPLRDSSLAATYAKLDLAKLDSATVADALTGAVVSPVITAHPTETRRRTVFVTQRRITELMRLHAEGHTETADGRSIERELRRQILTLWQTALIRLARLQISDEIDVGLRYYSAALFHVIPQVNSEVRNALRARWPDAELLSGPILQPGSWIGGDRDGNPNVTADVVRRATGSAAYTVVAHYLAELTHLEQELSMSARLITVTPELATLAASCQDAACADEPYRRALRVIRGRLSSTAAHILDQQPPNQLGLGLPPYSTPAELCADLDTIEASLCTHGAALLADDRLALLREGVGVFGFHLCGLDMRQNSDVHEEVVAELLAWAGMHQDYSSLPEDQRVKLLVAELGNRRPLVGDRAQLSDLARGELAVLAAAAHAVELYGSAAVPNYIISMCQSVSDVLEVAILLKETGLLDASGSQPYCPVGISPLFETIDDLHNGAAILHAMLELPLYRTLVAARGNWQEVMLGYSDSNKDGGYLAANWAVYRAELALVDVARKTGIRLRLFHGRGGTVGRGGGPSYQAILAQPPGAVNGSLRLTEQGEVIAAKYAEPQIARRNLESLVAATLESTLLDVEGLGDAAESAYAILDEVAGLARRSYAELVNTPGFVDYFQASTPVSEIGSLNIGNRPTSRKPTTSIADLRAIPWVLAWSQSRVMLPGWYGTGSAFQQWVAAGPESESQRVEMLHDLYQRWPFFRSVLSNMAQVLAKSDLGLAARYAELVVDEALRRRVFDKIADEHRRTIAIHKLITGHDDLLADNPALARSVFNRFPYLEPLNHLQVELLRRYRSGHDDEMVQRGILLTMNGLASALRNSG

SEQ ID NO: 9 - protein, 911 aa, Streptomyces coelicolor
MSSADDQTTTTTSSELRADIRRLGDLLGETLVRQEGPELLELVEKVRRLTREDGEAAAELLRGTELETAAKLVRAFSTYFHLANVTEQVHRGRELGAKRAAEGGLLARTADRLKDADPEHLRETVRNLNVRPVFTAHPTEAARRSVLNKLRRIAALLDTPVNESDRRRLDTRLAENIDLVWQTDELRVVRPEPADEARNAIYYLDELHLGAVGDVLEDLTAELERAGVKLPDDTRPLTFGTWIGGDRDGNPNVTPQVTWDVLILQHEHGINDALEMIDELRGFLSNSIRYAGATEELLASLQADLERLPEISPRYKRLNAEEPYRLKATCIRQKLENTKQRLAKGTPHEDGRDYLGTAQLIDDLRIVQTSLREHRGGLFADGRLARTIRTLAAFGLQLATMDVREHADAHHHALGQLFDRLGEESWRYADMPREYRTKLLAKELRSRRPLAPSPAPVDAPGEKTLGVFQTVRRALEVFGPEVIESYIISMCQGADDVFAAAVLAREAGLIDLHAGWAKIGIVPLLETTDELKAADTILEDLLADPSYRRLVALRGDVQEVMLGYSDSSKFGGITTSQWEIHRAQRRLRDVAHRYGVRLRLFHGRGGTVGRGGGPTHDAILAQPWGTLEGEIKVTEQGEVISDKYLIPALARENLELTVAATLQASALHTAPRQSDEALARWDAAMDVVSDAAHTAYRHLVEDPDLPTYFLASTPVDQLADLHLGSRPSRRPGSGVSLDGLRAIPWVFGWTQSRQIVPGWYGVGSGLKALREAGLDTVLDEMHQQWHFFRNFISNVEMTLAKTDLRIAQHYVDTLVPDELKHVFDTIKAEHELTVAEVLRVTGESELLDADPVLKQTFTIRDAYLDPISYLQVALLGRQREAAAANEDPDPLLARALLLTVNGVAAGLRNTG

SEQ ID NO: 10 - protein, 879 aa, Erwinia chrysanthemi
MNEQYSAMRSNVSMLGKLLGDTIKDALGANILERVETIRKLSKASRAGSETHRQELLTTLQNLSNDELLPVARAFSQFLNLTNTAEQYHSISPHGEAASNPEALATVFRSLKSRDNLSDKDIRDAVESLSIELVLTAHPTEITRRTLIHKLVEVNTCLKQLDHDDLADYERHQIMRRLRQLIAQYWHTDEIRKIRPTPVDEAKWGFAVVENSLWEGVPAFLRELDEQMGKELGYRLPVDSVPVRFTSWMGGDRDGNPNVTSEVTRRVLLLSRWKAADLFLRDVQVLVSELSMTTCTPELQQLAGGDEVQEPYRELMKALRAQLTATLDYLDARLKDEQRMPPKDLLVTNEQLWEPLYACYQSLHACGMGIIADGQLLDTLRRVRCFGVPLVRIDVRQESTRHTDALAEITRYLGLGDYESWSESDKQAFLIRELNSKRPLLPRQWEPSADTQEVLETCRVIAETPRDSIAAYVISMARTPSDVLAVHLLLKEAGCPYALPVAPLFETLDDLNNADSVMIQLLNIDWYRGFIQGKQMVMIGYSDSAKDAGVMAASWAQYRAQDALIKTCEKYGIALTLFHGRGGSIGRGGAPAHAALLSQPPGSLKGGLRVTEQGEMIRFKFGLPEVTISSLSLYTSAILEANLLPPPEPKQEWHHIMNELSRISCDMYRGYVRENPDFVPYFRAATPELELGKLPLGSRPAKRRPNGGVESLRAIPWIFAWTQNRLMLPAWLGAGAALQKVIDDGHQNQLEAMCRDWPFFSTRIGMLEMVFAKADLWLAEYYDQRLVDEKLWSLGKQLREQLERDIKAVLTISNDDHLMADLPWIAESIALRNVYTDPLNVLQAELLHRSRQQETLDPQVEQALMVTIAGVAAGMRNTG

SEQ ID NO: 11 - DNA, 1266 bp, Mycobacterium smegmatis
gtggcgctcgtcgtacagaaatacggcggatcctcggtggcggacgccgagaggatccgacgggtcgccgagcggatcgtcgagaccaagaaggcgggcaacgacgtcgtcgtcgtcgtctccgcgatgggtgacaccaccgatgacctgctggacctggcgcgccaggtgtcgcccgcgccgccgccgcgcgagatggacatgctgctgaccgccggtgagcggatctccaacgcgctggtcgcgatggccatcgaatcgctcggcgcgcaggcccggtccttcaccggatcgcaggccggtgtgatcaccacgggcacgcacggcaacgccaagatcatcgacgtcaccccgggccggttgcgcgacgcgctcgacgaggggcagatcgtgctggtcgccgggttccagggcgtcagccaggacagcaaggacgtcaccacgctgggacgcggcggttcggacaccacggccgtcgccgtggctgcggcactcgatgccgatgtctgcgagatctacaccgacgtcgacggcatcttcaccgcggacccgcgcatcgtgcccaacgcccgccacctcgacaccgtctccttcgaggagatgctggagatggcggcctgcggcgcgaaagttctgatgctgcgctgcgtcgagtacgcccgccgctacaacgtgcccatccacgtccggtcgtcgtattcggacaagcccggcaccatcgtcaaaggatcgatcgaggacatccccatggaagacgccatcctgaccggagtagcccacgaccgcagcgaggccaaggtcacggtggtcggtctgcccgacgttcccggctacgccgccaaggtgttccgcgcggtcgccgaggccgacgtgaacatcgacatggtgctgcagaacatctcgaagatcgaggacggcaagaccgacatcacgttcacgtgtgcgcgtgacaacggcccgcgggccgtagagaagctctcggcgctcaagagcgagatcggtttcagccaggtgctgtacgacgaccacatcggcaaggtgtcgctgatcggcgccggtatgcggtcgcatccgggcgtgacggccacgttctgcgaggcgctcgcggaggccggcatcaacatcgacctgatctcgacgtcggagatccgtatctcggtgctcatcaaggacaccgaactggacaaggcggtttcggcgctgcacgaggcgttcggcctcggcggcgacgacgaagccgtggtgtacgcgggaacggggcgctga

SEQ ID NO: 12 - protein, 1124 aa, Streptomyces coelicolor
MFRKVLVANRGEIAIRAFRAGYELGARTVAVFPHEDRNSLHRLKADEAYEIGEQGHPVRAYLSVEEIVRAARRAGADAVYPGYGFLSENPELARACEEAGITFVGPSARILELTGNKARAVAAAREAGVPVLGSSAPSTDVDELVRAADDVGFPVFVKAVAGGGGRGMRRVEEPAQLREAIEAASREAASAFGDSTVFLEKAVVEPRHIEVQILADGEGDVIHLFERDCSVQRRHQKVIELAPAPNLDPALRERICADAVNFARQIGYRNAGTVEFLVDRDGNHVFIEMNPRIQVEHTVTEEVTDVDLVQSQLRIAAGQTLADLGLAQENITLRGAALQCRITTEDPANGFRPDTGQISAYRSPGGSGIRLDGGTTHAGTEISAHFDSMLVKLSCRGRDFTTAVNRARRAVAEFRIRGVATNIPFLQAVLDDPDFQAGRVTTSFIEQRPHLLTARHSADRGTKLLTYLADVTVNKPHGERPELVDPLTKLPTASAGEPPAGSRQLLAELGPEGFARRLRESSTIGVTDTTFRDAHQSLLATRVRTKDMLAVAPVVARTLPQLLSLECWGGATYDVALRFLAEDPWERLAALREAVPNLCLQMLLRGRNTVGYTPYPTEVTDAFVQEAAATGIDIFRIFDALNDVEQMRPAIEAVRQTGSAVAEVALCYTADLSDPSERLYTLDYYLRLAEQIVNAGAHVLAVKDMAGLLRAPAAATLVSALRREFDLPVHLHTHDTTGGQLATYLAAIQAGADAVDGAVASMAGTTSQPSLSAIVAATDHTERPTGLDLQAVGDLEPYWESVRKVYAPFEAGLASPTGRVYHHEIPGGQLSNLRTQAVALGLGDRFEDIEAMYAAADRMLGRLVKVTPSSKVVGDLALHLVGAGVSPADFEQDPDRFDIPDSVVGFLRGELGTPPGGWPEPFRSKALRGRAEARPLAELSEDDRDGLGKDRRATLNRLLFPGPAREFDTHRASYGDTSILDSKDFFYGLRPGKEYTVDLDPGVRLLIELQAVGDADERGMRTVMSSLNGQLRPIQVRDRSAATDVPVTEKADRANPGHVAAPFAGVVTLAVAEGDEVEAGATVATIEAMKMEASITAPKSGTVTRLAINRIQQVEGGDLLVQLA

SEQ ID NO: 13 - protein, 1127 aa, Mycobacterium smegmatis
MISKVLVANRGEIAIRAFRAAYEMGIATVAVYPYEDRNSLHRLKADESYQIGEVGHPVRAYLSVDEIIRVAKHSGADAVYPGYGFLSENPDLAAKCAEAGITFVGPSAEVLQLTGNKARAIAAARAAGLPVLSSSEPSSSVDELMAAAADMEFPLFVKAVSGGGGRGMRRVTDRESLAEAIEAASREAESAFGDASVYLEQAVLNPRHIEVQILADGAGNVMHLFERDCSVQRRHQKVVELAPAPNLSDELRQQICADAVAFARQIGYSCAGTVEFLLDERGHHVFIECNPRIQVEHTVTEEITDVDLVSSQLRIAAGETLADLGLSQDRLVVRGAAMQCRITTEVPANGFRPDTGRITAYRSPGGAGIRLDGGTNLGAEISAHFDSMLVKLTCRGRDFSAAASRARRALAEFRIRGVSTNIPFLQAVIDDPDFRAGRVTTSFIDDRPHLLTSRSPADRGTRILNYLADITVNKPHGERPSTVYPQDKLPPLDLQAPPPAGSKQRLVELGPEGFAGWLRESKAVGVTDTTFRDAHQSLLATRVRTTGLLMVAPYVARSMPQLLSIECWGGATYDVALRFLKEDPWERLAALRESVPNICLQMLLRGRNTVGYTPYPELVTSAFVEEAAATGIDIFRIFDALNNVESMRPAIDAVRETGSTIAEVAMCYTGDLSDPAENLYTLDYYLKLAEQIVEAGAHVLAIKDMAGLLRAPAAHTLVSALRSRFDLPVHVHTHDTPGGQLATYLAAWSAGADAVDGASAPMAGTTSQPALSSIVAAAAHTQYDTGLDLRAVCDLEPYWEAVRKVYAPFESGLPGPTGRVYTHEIPGGQLSNLRQQAIALGLGDRFEEIEANYAAADRVLGRLVKVTPSSKVVGDLALALVGAGITAEEFAEDPAKYDIPDSVIGFLRGELGDPPGGWPEPLRTKALQGRGPARPVEKLTADDEALLAQPGPKRQAALNRLLFPGPTAEFEAHRETYGDTSSLSANQFFYGLRYGEEHRVQLERGVELLIGLEAISEADERGMRTVMCIINGQLRPVLVRDRSIASEVPAAEKADRNNADHIAAPFAGVVTVGVAEGDSVDAGQTIATIEAMKMEAAITAPKAGTVARVAVAATAQVEGGDLLVVVS

SEQ ID NO: 14 - protein, 325 aa, Thermobifida fusca
MVGSTTPNAPFGQMLTAMITPMLDNGEVDYDGVARLATYLVDEQRNDGLIVNGTTGESATTSDEEKERILRTVIDAVGDRATIVAGAGSNDTRHSIELARTAERAGADGLLLVTPYYNRPPQEGLLRHFTAIADATGLPIMLYDIPGRTGTPIDSETLVRLAEHPRIVANKDAKDDLGASSWVMSRTDLAYYSGSDMLNLPLLSIGAAGFVSVVGHVVGSELHDMIDAYRAGDVARALDIHRRLIPVYRGMFRTQGVITTKAVLAMFGLPAGVVRAPLLDASPELKELLREDLAMAGVKGPTGLASAHEDAASGREAERLTEGTA

SEQ ID NO: 15 - protein, 300 aa, Mycobacterium leprae
MTTVGFDVPARLGTLLTAMVTPFDADGSVDTAAATRLANRLVDAGCDGLVLSGTTGESPTTTDDEKLQLLRVVLEAVGDRARVIAGAGSYDTAHSVRLVKACAGEGAHGLLVVTPYYSKPPQTGLFAHFTAVADATELPVLLYDIPGRSVVPIEPDTIRALASHPNIVGVKEAKADLYSGARIMADTGLAYYSGDDALNLPWLAVGAIGFISVISHLAAGQLRELLSAFGSGDITTARKINVAIGPLCSAMDRLGGVTMSKAGLRLQGIDVGDPRLPQMPATAEQIDELAVDMRAASVLR

SEQ ID NO: 16 - protein, 300 aa, Mycobacterium tuberculosis
MTTVGFDVAARLGTLLTAMVTPFSGDGSLDTATAARLANHLVDQGCDGLVVSGTTGESPTTTDGEKIELLRAVLEAVGDRARVIAGAGTYDTAHSIRLAKACAAEGAHGLLVVTPYYSKPPQRGLQAHFTAVADATELPMLLYDIPGRSAVPIEPDTIRALASHPNIVGVKDAKADLHSGAQIMADTGLAYYSGDDALNLPWLAMGATGFISVIAHLAAGQLRELLSAFGSGDIATARKINIAVAPLCNAMSRLGGVTLSKAGLRLQGIDVGDPRLPQVAATPEQIDALAADMRAASVLR

SEQ ID NO: 17 - protein, 299 aa, Streptomyces coelicolor
MAPTSTPQTPFGRVLTAMVTPFTADGALDLDGAQRLAAHLVDAGNDGLIINGTTGESPTTSDAEKADLVRAVVEAVGDRAHVVAGVGTNNTQHSIELARAAERVGAHGLLLVTPYYNKPPQEGLYLHFTAIADAAGLPVMLYDIPGRSGVPINTETLVRLAEHPRIVANKDAKGDLGRASWAIARSGLAWYSGDDMLNLPLLAVGAVGFVSVVGHVVTPELRAMVDAHVAGDVQKALEIHQKLLPVFTGMFRTQGVMTTKGALALQGLPAGPLRAPMVGLTPEETEQLKIDLAAGGVQL

SEQ ID NO: 18 - protein, 292 aa, Erwinia chrysanthemi
MFTGSIVALVTPMDDKGAVDRASLKKLIDYHVASGTSAIVSVGTTGESATLSHDEHGDVVMLTLELSDGRIPVIAGTGANSTAEAISLTQRFNDTGVAGCLTVTPYYNKPTQNGLFLHFKAIAEHTDLPQILYNVPSRTGCDMLPETVARLSEIKNIVAIKEATGNLSRVSQIQELVHEDFILLSGDDASSLDFMQLGGDGVISVTANIAAREMAALCELAAQGNFVEARRLNQRLMPLHQKLFVEPNPIPVKWACKALGLMATDTLRLPMTPLTDAGRDVMEQAMKQAGLL

SEQ ID NO: 19 - protein, 429 aa, Streptomyces coelicolor
MRTRPLKVALLGCGVVGSKVARIMTTHAADLAARIGAPVELAGVAVRRPDKVREGIDPALVTTDATALVKRGDIDVVVEVIGGIEPARTLITTAFAHGASVVSANKALIAQDGAALHAAADEHGKDLYYEAAVAGAIPLIRPLRESLAGDKVNRVLGIVNGTTNFILDAMDSTGAGYQEALDEATALGYAEADPTADVEGFDAAAKAAILAGIAFHTRVRLDDVYREGMTEVTAADFASAKEMGCTIKLLAICERAADGGSVTARVHPAMIPLSHPLANVREAYNAVFVESDAAGQLMFYGPGAGGSPTASAVLGDLVAVCRNRLGGATGPGESAYAALPVSPMGDVVTRYHISLDVADKPGVLAQVATVFAEHGVSIDTVRQSGKDGEASLVVVTHRASDAALGGTVEALRKLDTVRGVASIMRVEGE

SEQ ID NO: 20 - protein, 373 aa, Mycobacterium smegmatis
MSKKPIGVAVLGLGNVGSEVVRIIADSADDLAARIGAPLELRGVGVRRVADDRGVPTELLTDDIDALVSRDDVDIVVEVMGPVEPARKAILSALEQGKSVVTANKALMAMSTGELAQAAEKAHVDLYFEAAVAGAIPVIRPLTQSLAGDTVRRVAGIVNGTTNYILSEMDSTGADYTSALADASALGYAEADPTADVEGYDAAAKAAILASIAFHTRVTADDVYREGITTVSAEDFASARALGCTIKLLAICERLTSDEGKDRVSARVYPALVPLTHPLAAVNGAFNAVVVEAEAAGRLMFYGQGAGGAPTAFAVMGDVVMAARNRVQGGRGPRESKYAKLPIAPIGFIPTRYYVNMNVADRPGVLSAVAAEF

SEQ ID NO: 21 - protein, 616 aa, Thermobifida fusca
MRRPEPAGAADRGRTRPRHRRTGGHHPLRGRHGQGRGGDPHLCQCRRRYERQHPHRAVRCGVHLCAGLAAQRRRADAVPPGRQALRERRHRRARPLPPCRPASRRPGSSGRHRRLLLLHGQQLQPRAPACRGRGPREERPRPGATGNRRRPVAAGRRLSSGRRRSGHHDEVLDTDNERRNGSHPLMALKVALLGCGVVGSQVVRLLNEQSRELAERIGTPLEIGGIAVRRLDRARGTGVDPDLLTTDAMGLVTRDDIDLVVEVIGGIEPARSLILAAIQKGKSVVTANKALLAEDGATIHAAAREAGVDVYYEASVAGAIPLLRPLRDSLAGDRVNRVLGIVNGTTNYILDRMDSLGAGFTESLEEAQALGYAEADPTADVEGFDAAAKAAILARLAFHTPVTAADVHREGITEVSAADIASAKAMGCVVKLLAICQRSDDGSSIGVRVHPVMLPREHPLASVKGAYNAVFVEAESAGQLMFYGAGAGGVPTASAVLGDLVAVARNRLARTFVADGRADAKLPVHPMGETITSYHVALDVADRPGVLAGVAKVFAANGVSIKHVRQEGRGDDAQLVLVSHTAPDAALARTVEQLRNHEDVRAVASVMRVETFDNER

SEQ ID NO: 22 - protein, 379 aa, Mycobacterium tuberculosis
MTISDVPTQTLPAEGEIGLIDVGSLQLESGAVIDDVCIAVQRWGKLSPARDNVVVVLHALTGDSHITGPAGPGHPTPGWWDGVAGPGAPIDTTRWCAVATNVLGGCRGSTGPSSLARDGKPWGSRFPLISIRDQVQADVAALAALGITEVAAVVGGSMGGARALEWVVGYPDRVRAGLLLAVGARATADQIGTQTTQIAAIKADPDWQSGDYHETGRAPDAGLRLARRFAHLTYRGEIELDTRFANHNQGNEDPTAGGRYAVQSYLEHQGDKLLSRFDAGSYVILTEALNSHDVGRGRGGVSAALRACPVPVVVGGITSDRLYPLRLQQELADLLPGCAGLRVVESVYGHDGFLVETEAVGELIRQTLGLADREGACRR

SEQ ID NO: 23 - protein, 382 aa, Mycobacterium leprae
MTISKVPTQKLPAEGEVGLVDIGSLTTESGAVIDDVCIAVQRWGELSPTRDNVVMVLHALTGDSHITGPAGPGHPTPGWWDWIAGPGAPIDTNRWCAIATNVLGGCRGSTGPSSLARDGKPWGSRFPLISIRDQVEADIAALAAMGITKVAAVVGGSMGGARALEWIIGHPDQVRAGLLLAVGVRATADQIGTQTTQIAAIKTDPNWQGGDYYETGRAPENGLTIARRFAHLTYRSEVELDTRFANNNQGNEDPATGGRYAVQSYLEHQGDKLLARFDAGSYVVLTETLNSHDVGRGRGGIGTALRGCPVPVVVGGITSDRLYPLRLQQELAEMLPGCTGLQVVDSTYGHDGFLVESEAVGKLIRQTLELADVGSKEDACSQ

SEQ ID NO: 24 - protein, 379 aa, Thermobifida fusca
MSHDTTPPLPATGAWREGDPPGDRRWVELSEPLPLETGGELPGVRLAYETWGSLNEDRSNAVLVLHALTGDSHVVGPEGPGHPSPGWWEGIIGPGLALDTDRYFVVAPNVLGGCQGSTGPSSTAPDGRPWGSRFPRITIRDTVRAEFALLREFGIHSWAAVLGGSMGGMRALEWAATYPERVRRLLLLASPAASSAQQIAWAAPQLHAIRSDPYWHGGDYYDRPGPGPVTGMGIARRIAHITYRGATEFDERFGRNPQDGEDPMAGGRFAVESYLDHHAVKLARRFDAGSYVVLTQAMNTHDVGRGRGGVAQALRRVTARTMVAGVSSDFLYPLAQQQELADGIPGADEVRVIESASGHDGFLTEINQVSVLIKELLAQ

SEQ ID NO: 25 - protein, 452 aa, Thermobifida fusca
MALRPDRSIMTAEDTTPESTAADKWSFETKQIHAGAAPDPATNARATPIYQTTSYVFRDTQHGADLFSLAEPGNIYTRIMNPTQDVLEKRVAALEGGVAAVAFASGSAAITAAVLNLAGAGDHIVSSPSLYGGTYNLFRYTLPKLGIEVTFIKDQDDLDEWRAAARDNTKLFFAETLPNPANNVLDVRAVADVAHEVGVPLMVDNTVPTPYLQRPIDHGADIVVHSATKFLGGHGTTIAGIVVDAGTFDFGAHGDRFPGFVEPDPSYHGLKYWEALGPGAYAAKLRVQLLRDTGAAISPFNSFLILQGIETLSLRMERHVANAQALAEWLESRDEVAKVYYPGLPSSPYYEAAKKYLPKGAGAIVSFELHGGIEAGRAFVDGTELFSQLVNIGDVRSLIVHPASTTHSQLTPEEQLASGVTPGLVRLSVGLEHVDDLRADLEAGLRAAKAYQ

SEQ ID NO: 26 - protein, 449 aa, Mycobacterium tuberculosis
MSADSNSTDADPTAHWSFETKQIHAGQHPDPTTNARALPIYATTSYTFDDTAHAAALFGLEIPGNIYTRIGNPTTDVVEQRIAALEGGVAALFLSSGQAAETFAILNLAGAGDHIVSSPRLYGGTYNLFHYSLAKLGIEVSFVDDPDDLDTWQAAVRPNTKAFFAETISNPQIDLLDTPAVSEVAHRNGVPLIVDNTIATPYLIQPLAQGADIVVHSATKYLGGHGAAIAGVIVDGGNFDWTQGRFPGFTTPDPSYHGVVFAELGPPAFALKARVQLLRDYGSAASPFNAFLVAQGLETLSLRIERHVANAQRVAEFLAARDDVLSVNYAGLPSSPWHERAKRLAPKGTGAVLSFELAGGIEAGKAFVNALKLHSHVANIGDVRSLVIHPASTTHAQLSPAEQLATGVSPGLVRLAVGIEGIDDILADLELGFAAARRFSADPQSVAAF

SEQ ID NO: 27 - protein, 403 aa, Mycobacterium tuberculosis
MSEKGRLFTSESVTEGHPDKICDAISDSVLDALLAADPRSRVAVETLVTTGQVHVVGEVTTSAKEAFADITNTVRARILEIGYDSSDKGFDGATCGVNIGIGAQSPDIAQGVDTAHEARVEGAADPLDSQGAGDQGLMFGYAINATPELMPLPIALAHRLSRRLTEVRKNGVLPYLRPDGKTQVTIAYEDNVPVRLDTVVISTQHAADIDLEKTLDPDIREKVLNTVLDDLAHETLDASTVRVLVNPTGKFVLGGPMGDAGLTGRKIIVDTYGGWARHGGGAFSGKDPSKVDRSAAYAMRWVAKNVVAAGLAERVEVQVAYAIGKAAPVGLFVETFGTETEDPVKIEKAIGEVFDLRPGAIIRDLNLLRPIYAPTAAYGHFGRTDVELPWEQLDKVDDLKRAI

SEQ ID NO: 28 - protein, 403 aa, Mycobacterium leprae
MSEKGRLFTSESVTEGHPDKICDAISDSILDALLAEDPCSRVAVETLVTTGQVHVVGEVTTLAKTAFADISNTVRERILDIGYDSSDKGFDGASCGVNIGIGAQSSDIAQGVNTAHEVRVEGAADPLDAQGAGDQGLMFGYAINDTPELMPLPIALAHRLARRLTEVRKNGVLPYLRSDGKTQVTIAYEDNVPVRLDTVVISTQHAAGVDLDATLAPDIREKVLNTVIDDLSHDTLDVSSVRVLVNPTGKFVLGGPMGDAGLTGRKIIVDTYGGWARHGGGAFSGKDPSKVDRSAAYAMRWVAKNIVAAGLAERIEVQVAYAIGKAAPVGLFVETFGTEAVDPAKIEKAIGEVFDLRPGAIIRDLHLLRPIYAQTAAYGHFGRTDVELPWEQLNKVDDLKRAI

SEQ ID NO: 29 - protein, 397 aa, Thermobifida fusca
MSRRLFTSESVTEGHPDKIADQISDAILDSMLRDDPHSRVAVETLITTGLVHVAGEVTTSTYVDIPTIIREKILEIGYDSSAKGFDGASCGVSVSIGGQSPDIAQGVDNAYEAREEEIFDDLDRQGAGDQGLMFGYAPELMPLPITLAHALSQRLAEVRRDGTIPYLRPDGKTQVTVEYDGNRNNETPVRLDTVVVSSQHAPDIDLRELLTPDIKEHVVDPVVARYNLEADNYRLLVNPTGRFEIGGPMGDAGLTGRKIIVDTYGGYARHGGGAFSGKDPSKVDRSAAYATRWVAKNIVAAGLADRVEVQVAYAIGKAHPVGVFLETFGTEKVAPEQLEKAVLEVFDLRPAAIIRDLDLLRPIYSQTSVYGHFGRELPDFTWERTDRVDALKAAVGA

SEQ ID NO: 30 - protein, 402 aa, Streptomyces coelicolor
MSRRLFTSESVTEGHPDKIADQISDTILDALLREDPTSRVAVETLITTGLVHVAGEVTTKAYADIANLVRGKILEIGYDSSKKGFDGASCGVSVSIGAQSPDIAQGVDTAYENRVEGDEDELDRQGAGDQGLMFGYASDETPTLMPLPVFLAHRLSKRLSEVRKNGTIPYLRPDGKTQVTIEYDGDKAVRLDTVVVSSQHASDIDLESLLAPDIKEFVVEPELKALLEDGIKIDTENYRLLVNPTGRFEIGGPMGDAGLTGRKIIIDTYGGMARHGGGAFSGKDPSKVDRSAAYAMRWVAKNVVAAGLAARCEVQVAYAIGKAEPVGLFVETFGTAKVDTEKIEKAIDEVFDLRPAAIIRALDLLRPIYAQTAAYGHFGRELPDFTWERTDRVDALREAAGL

SEQ ID NO: 31 - DNA, 1266 bp, Amycolatopsis mediterranei
gtggccctcgtggtccagaagtacggcggatcgtcgctggaaagtgccgaccggatcaagcgcgtggcggagcggatcgtcgcgacgaagaaggcgggcaacgacgtcgtcgtcgtctgctcggcgatgggtgacaccaccgacgagctgctcgacctggcgcagcaggtcaacccggcgccgccggagcgggagatggacatgctgctcaccgccggtgagcgcatctcgaactcgctggtcgcgatggcgatcgcggcccagggcgccgaggcgtggtcgttcaccggttcgcaggccggcgtcgtcacgacgtcggtgcacggcaacgcgcgcatcatcgacgtcacgccgagccgggtcaccgaggcgctcgaccaggggtacatcgcgctggtggcgggcttccagggcgtcgcgcaggacaccaaggacatcaccacgctgggccgcggcggctcggacaccaccgccgtcgcgctggccgccgcgctgaacgccgacgtctgcgagatctactccgatgtggacggtgtgtacacggcggacccgcgggtggtgccggacgcgaagaagctcgacaccgtcacgtacgaagagatgctcgagctcgccgcgagcgggtcgaagatcctgcacctgcgttcggtcgagtacgcgcgccgctacggcgtcccgatccgagtccgttcttcctacagcgacaagccgggcacgacggtgaccggttctatcgaggagatccccgtggaacaagccctgatcaccggtgtggcgcacgaccgctccgaagccaagatcacggtcaccggggtgccggaccacaccggcgccgcggcccggatcttccgcgtgatcgccgacgccgagatcgacatcgacatggtgctgcagaacgtgtccagcaccgtctccggccgcacggacatcacgttcacgctgtcgaaggccaacggcgccaaggccgtcaaggaactggagaaggtccaggcggagatcggcttcgagtcggtcctctacgacgaccacgtcggcaaggtgtcggtggtcggcgccgggatgcgctcgcacccgggtgtcacggcgacgttctgcgaagcgctggccgaggccggcgtcaacatcgaaatcatcaacacctcggagatccgcatttcggtgctgatccgcgacgcgcagctcgacgacgccgtgcgcgcgatccacgaggcattcgaactcggcggcgacgaagaagccgtcgtctacgcggggagtggtcgctga

SEQ ID NO: 32 - DNA, 1278 bp, Streptomyces coelicolor
gtgggccttgtcgtgcagaagtacggaggctcctccgtagccgatgccgagggcatcaagcgcgtcgccaagcggatcgtggaagcgaagaagaacggcaaccaggtggtcgccgtcgtttccgcgatgggcgacacgacggacgagctgatcgatctcgccgagcaggtttccccgatccctgccgggcgtgaactcgacatgctgctgaccgccggggagcgtatctccatggcgctgctggccatggcgatcaaaaacctgggccacgaggcccagtcgttcaccggcagccaggccggagtcatcaccgactcggtccacaacaaggcccggatcatcgacgtcacaccgggtcgcatccgcacctcggtcgacgagggcaacgtggccatcgtggccggcttccagggcgtcagccaggacagcaaggacatcaccacgctgggccgcggcgggtccgacaccacggccgtcgccctcgccgccgcgctcgacgcggacgtctgcgagatctacaccgacgtcgacggcgtgttcaccgccgacccgcgcgtggtgccgaaggcgaagaagatcgactggatctccttcgaggacatgctggagctcgctgcctccggctccaaggtgctgctccaccgttgcgtggagtacgcccgccggtacaacatcccgattcacgtgcggtccagcttcagcggactccagggcacgtgggtcagcagcgagccgatcaagcaaggggaaaagcacgtggagcaggccctcatctccggagtcgcgcacgacacctccgaggccaaggtcacggtcgtcggggtgcccgacaagccgggcgaggcggccgcgatcttccgcgccatcgccgacgcccaggtcaacatcgacatggtcgtgcagaacgtgtccgccgcctccacgggcctgacggacatctcgttcacgctccccaagagcgagggccgcaaggccatcgacgcgctggagaagaaccgcccgggcatcggcttcgactcgctgcgctacgacgaccagatcggcaagatctcgctggtcggcgccggtatgaagagcaatccgggcgtcaccgccgacttcttcaccgcgctctccgacgccggggtgaacatcgagctgatctcgacctccgagatccgcatctcggtcgtcacccgcaaggacgacgtgaacgaggccgtgcgcgccgtgcacaccgccttcgggctcgactccgacagtgacgaggccgtggtctacgggggcaccgggcgctga

SEQ ID NO: 33 - DNA, 1338 bp, Thermobifida fusca
gtgaatctccgatcactagactggctggtcgattaccgtgaacccgattcctcaggagcgccgaccgtggctttgatcgtgcaaaagtacggcgggtcgtccgtcgctgatgcggatgccattaagcgggtagccgaacggatcgtcgctcagaagaaagccggatacgacgtggtcgtcgtggtctccgccatgggcgacaccactgacgagcttctcgaccttgcgaagcaggtgagtccgctcccgccgggccgggagttggacatgctgctgactgccggggagcggatctcgatggccctggttgcgatggctatcgggaacttgggctatgaggcccggtcgttcaccggttcgcaggccggggtgatcaccacgtcgctgcacggcaacgcgaagatcatcgatgtcaccccggggcggatcagggatgcgctcgccgaaggggcgatctgcatcgtcgctggcttccaaggggtgtcgcaggacagcaaggacatcaccacgttgggccgcggtggttcggacactacggctgtggcgcttgctgcggcgctcaacgccgacttgtgcgagatctacaccgacgtcgacggggtgttcactgctgatccgcgtatcgtgccctccgctcgacgcatcccccagatctcctacgaggagatgctggagatggcggcctccggcgccaagatcctgcatctgcgctgcgtggagtatgcgcggcggtacaacattccgctgcacgtgcgctcgtctttcagtcagaagcccggtacctgggtcgtctcggaagttgaggaaaccgaaggcatggaacaaccgatcatctccggcgtggcgcatgaccggagcgaagccaagatcacggttgtgggggtgcccgaccgtgtcggcgaggcagcagcgatcttcaaggcgctggccgacgctgagatcaacgtggacatgatcgtgcagaacgtgtccgcggcttccacgtcgcgtacggacatttctttcactctgcctgccgactcggggcagaacgcgctggccgcgttgaagaagatccaggacaaggtcggtttcgagtcgctgctgtacaacgaccggatcggcaaggtgtcgctgatcggcgcggggatgcgctcctatccgggggtgactgctcggttctttgacgctgtggcccgcgagggcatcaacatcgagatgatttccacttccgagatccgcatctcgatcgtggtggcgcaggacgacgtggacgccgcagtggccgccgcgcaccgtgagttccagttggacgccgaccaggtcgaggccgttgtgtatggaggtaccggccgatga

SEQ ID NO: 34 - DNA, 1365 bp, Erwinia chrysanthemi
atgtctgctaacactgataactcactgattatcgccaaattcggcggcaccagcgtcgctgatttcgacgccatgaaccgcagcgccgacatcgtgctgtccgacgcgcaggtacgggtggtggtgctgtccgcctccgccggcgtgaccaacctgctggtggcgctggcggaaggtttaccgccatctgaacgcaccgcgcaactggaaaaactgcgccagattcaatacgccatcatcgaccgcctcaaccagccggccgtcatccgtgaagaaatcgaccgcatgctggacaacgtggcccgcctgtcggaagcggcggcgctggcgacttccaacgccctgaccgacgaactggtcagccacggcgagctgatatccaccttgctgtttgtggaaattctgcgcgagcgcaacgtcgccgccgaatggttcgacgtgcgtaaaatcatgcgtaccaacgaccgcttcggccgcgccgagccggactgcgacgcgctgggcgaactgacccgcagccagctgacgccgcgtctggcgcaggggctgatcatcacccagggcttcatcggcagcgaagctaaaggccgcaccaccacgctgggccgcggcggcagcgattacaccgccgctctgctgggcgaagcgctgcacgccagccgtatcgacatctggaccgacgttcccggcatctacaccaccgacccgcgcgtggtgccgtccgcccaccgcatcgaccagattacctttgaagaagcggccgaaatggccaccttcggcgccaaggtgctgcacccggccacactgctgcctgccgtacgcagcgacattccggtattcgtcggctccagcaaagacccggcggccggcggcacgctggtgtgcaacaacaccgaaaacccgccgctgttccgcgcgctggcgctgcgccgcaagcagacgctgctgaccctgcatagccttaacatgctgcacgcgcgcggctttctggcggaagtgttcagtattctggctcgccacaacatctcggtggatttgatcactacctccgaggtgaacgtcgcgctgacgctggacaccaccggctcgacctcgaccggcgatagcctgctgtccagcgcgctgctgactgaactgtcctcgctgtgtcgggtggaagtggaagagaacatgtcgctggtggcgctgatcggcaaccagctgtcgcaggcctgcggcgtcggcaaagaggtgttcggggtgctggagccatttaatatccgcctcatctgctacggcgccagcagccacaacctgtgcttcctggtgccgtccagcgatgccgagcaggtggtgcagacgctgcatcacaatctgtttgaataa

SEQ ID NO: 35 - DNA, 1254 bp, Shewanella oneidensis
gtgctcgaaaaacgaaagcttagtggtagcaagctttttgtgaagaagtttggtggcacttcggtgggttcaattgaacgtatcgaagtggttgccgaacagattgcaaagtccgctcacagtggtgagcagcaagtattagttctttctgctatggcaggggagacaaataggctatttgcgctagcagcgcaaatcgatccccgcgcgagtgctcgggaactcgatatgttggtctcaacgggtgagcaaattagtattgcgttgatggcgatggcgttgcagcgtcgcggtatcaaggcaagatcgctcactggcgatcaagtgcaaatccatacaaatagtcagtttggtcgtgccagtattgagagcgtcgatacggcgtacttaacgtccttgctcgaacaaggcattgtgccgattgtggcagggtttcaagggatcgatcctaatggcgatgtcacaaccttaggtcgtggtggttccgatacgacggctgtagcgctcgccgcagcgttaagagccgatgaatgccagatatttaccgatgtttcaggggtgtttactacagacccaaatatcgatagtagcgcaaggcgtctggatgtgattggctttgacgtcatgcttgaaatggcaaagttaggcgctaaagtacttcatcctgattctgttgaatatgcacagcgttttaaagtaccgcttcgggtgttgtcgagtttcgaagctgggcaaggtacattaattcaatttggtgatgaatctgagcttgcgatggccgcatctgtacaaggtattgcgatcaacaaagccttagcaacgttgaccatcgaaggtttgttcaccagcagtgagcgttaccaagcactattggcttgtttggcccgactggaggtagatgttgaatttatcactcctttgaaattgaatgaaatttctcctgttgagtcagtcagtttcatgttagccgaagctaaagtggatattttattgcacgagcttgaggttttaagcgaaagtcttgatctagggcaattgattgttgagcgccaacgtgcaaaagtgtctttagttggcaaaggtttacaggcaaaagttggattattgactaagatgttagatgtattgggtaacgaaacaattcatgctaagttactttcgacatcggagagtaaattgtcaactgtgatcgatgaaagggacttgcacaaggcggttcgggcgttgcatcatgctttcgagctaaataaggtg

SEQ ID NO: 36 - DNA, 2625 bp, Thermobifida fusca
atgacacgcgacagcgcccgccaggagatgcccgaccagcttcgccgcgacgtccggttgctcggcgaaatgctcggcaccgtacttgccgagagtggcggtcaagacctgcttgacgatgtggaacgactccgccgcgccgtcatcggagctcgcgaggggacggtcgagggcaaagagatcaccgagctcgtcgcctcgtggccactggaacgcgccaagcaggtggcgcgtgccttcaccgtctacttccacctggtcaacctggctgaagagcaccaccgtatgcgcgccctgcgggaacgcgacgacgcggccacaccgcagcgcgaatcgctggctgccgcagtgcactccatccgcgaagacgccgggccagagcggctgcgcgaactcatcgcgggcatggaattccacccggtcctgaccgcgcaccccaccgaagcgcgccgtcgcgccgtctccaccgcgatccagcgcatcagtgcccaactggaacgcctgcacgcggcccacccgggaagcggcgccgaagccgaggcgcgtcgcagactcctcgaagaaatcgacctgctgtggcgaacatcacagctccgctatacgaagatggacccgctcgacgaagtgcggaccgccatggccgccttcgacgagaccatcttcaccgtcatccccgaggtctaccgcagcctcgaccgggcgctcgaccccgaaggctgcggacggcgccccgcgctggcgaaagccttcgtccgctacggcagttggatcggcggtgaccgcgacggcaaccccttcgtcacccacgaagtgacgcgggaagccatcaccatccagtccgagcacgtgctgcgcgccctggaaaacgcctgcgaacgcatcggccgcacccacaccgagtacaccggcctcaccccgcccagcgcggaactgcgcgccgcgctgagcagcgcccgggctgcctacccgcgcctgatgcaggagatcatcaagcgctcgcccaacgaaccccaccgccagctcctgctgctcgccgcggaacggctccgcgccacccggctgcgcaacgccgacctcggctaccccaacccggaagcgttcctcgccgacctgcggaccgtccaagagtcgcttgctgccgcgggcgctgtgcgccaagcctacggcgaactccaaaacctcatctggcaggccgaaaccttcggcttccacctcgcggaactggaaatccgccagcacagcgcagtccacgccgccgcactcaaggagatacgcgctggcggggaactgtccgaacgtaccgaggaagtcctcgccaccctgcgggtcgtcgcctggattcaggagcggttcggcgtggaagcatgccgccgctacatcgtcagcttcacccagtccgctgacgacatcgccgccgtctacgagctcgccgagcacgccatgcccccgggcaaggcgcccatcctcgacgtcatcccgctcttcgaaaccggtgccgacctggacgcggccccccaggtcctcgacggcatgctccgcctgcccgccgtccagcgccgcctcgagcagaccggccgccgcatggaagtcatgctcggctacagcgactccgccaaggacgtcggcccggtcagcgccaccctgcggctctacgacgcccaggcgcggctggccgaatgggcgcgcgagcacgacatcaaactcaccctgttccacggccgcggcggtgccctgggccgcggcggcgggcccgccaaccgggccgtcctcgcccaggcccccggatcggtggacggccgcttcaaggtcaccgagcagggcgaagtcatcttcgcccgctacggtcagcgggcgatcgcccaccgccacatcgaacaggtgggccacgccgtgctcatggcctccaccgaaagcgtgcagcggagagccgccgaggcagccgcccggttccgcggtatggctgaccgcatcgccgaagccgcccacgccgcctaccgcgccctcgtcgacactgaagggttcgcggagtggttctcccgggtcagcccgttggaggagctgagtgagctgcggctggggtcgcgtccggcgcgccgctcggctgcccgcggcctcgacgacctccgcgctatcccgtgggtgttcgcctggacccagacccgggtcaatctgcctggctggtacgggctcggcagcggcctggccgcggtcgacgacctggaagcgctgcacaccgcctacaaggagtggccgctgttcgcctcgctgctggacaacgccgagatgagcctggccaagaccgaccgggtgatcgccgagcgctacctcgcgctgggcgggcgtccagagctcaccgaacaggtcctcgccgaatacgaccgcacccgggaactggtcctcaaagtcacgcggcacacccgcctcctcgagaaccgccgggtgctgtcccgcgcggtcgacctgcgcaacccctacgtggacgccctttcgcacctgcagctgcgtgctctggaagccctgcgcaccggggaagccgaccggctgtccgaggaggaccgcaaccacctggaacggctcctgctgctctcggtcaacggtgtggccgcagggctccagaacactggg

SEQ ID NO: 37 - DNA, 2802 bp, Mycobacterium leprae
atggttgagttttccgatgctatactggaaccgatcggtgctgtccagcggactcgagtcggtcgcgaggcgactgaacctatgcgggccgacatcaggctattgggtaccattcttggtgatactctgcgtgagcagaacggtgatgaggtattcgatctcgtcgaacgagtccgggtcgagtcgttccgggtgcggcgttctgagattgatcgggccgatatggcgcgtatgttctctggtctcgacattcacctggccatcccgatcatccgggcgtttagccatttcgcattgttggccaacgttgccgaggacatccaccgggagcgtcggcgccatattcacctcgacgccggcgagccactgcgggatagcagtttagcggccacttacgcgaaacttgatctggcaaaactagattcggccaccgtggcagatgcccttactggtgcagtggtctcgccggtgattactgcgcatcccaccgagacccgtcggcgtaccgtatttgttacccaacgccggattaccgagttgatgcggctgcacgcggagggacacaccgaaaccgccgatggccgcagcattgagcgtgaattgcgccgtcaaattctcacgctgtggcagacggcattgattcggttggcgcgattgcagatctccgacgagatcgacgtagggctgcgatattactctgccgcgcttttccatgtgattccgcaggtgaattccgaggtgcgcaacgcgttgcgtgcccggtggcccgacgccgagctgctgtccggccctatactgcaacccggatcgtggatcggtggtgaccgggacggaaacccgaacgtgactgccgacgtggtgcggcgagcgaccggcagcgctgcctacaccgtggtggcgcactatttggctgaactcacccacctcgagcaggagctgtcgatgtcggcgcgactgataaccgtcacccctgagctggccacgctggccgctagctgtcaggacgcggcctgtgccgacgagccgtaccggcgggcattgcgggtgatccgcggtcgattgtcctcgactgccgcccacatcctggatcagcagccacccaaccagcttggtctgggtttgccaccgtattcgacgccagccgaactatgtgccgatctggacaccatcgaagcctccctgtgcacgcacggcgccgcgttgttagccgacgatcggttggcgctgttgcgagaaggtgttggagtctttgggtttcacttgtgcggtctggatatgcggcaaaattccgacgtgcacgaagaggtggtcgctgagctgttggcgtgggccgggatgcaccaggactacagttcgttgcccgaagatcaaagagtcaagctgctggtggccgaactcggtaaccgccgcccgttggtcggggatcgtgcgcaattatccgatttggcgcgcggcgagctggccgttcttgcggccgctgcccacgccgttgagctctacggatcggccgcggtgcccaactacatcatctcgatgtgtcagtctgtgtcggatgtcctggaggtcgcgatcctcttgaaggagactggcctgttagacgcctccgggtcgcagccgtactgtccggtgggcatctcgccgctgttcgagacgatcgacgatctgcacaacggggcggccattctgcacgcgatgctggaacttccgctatatcgaacgctggtggctgctcgcggtaactggcaggaagtgatgctcggctactccgattccaacaaagatggcggctatctggccgccaactgggcggtttaccgcgccgagctcgctctggtagacgtggcccgcaaaaccggaatccgtttgcgacttttccatggtcgtggcggcactgtcggacgtggcggcggtcctagctatcaagctattctggcgcaacccccgggggcggtaaacggctcgttgcgtctcaccgagcaaggcgaggtcatagccgccaaatacgccgaaccgcaaatagcacgacgaaacctagagagtttggtggccgcgaccctagaatcaactctcttggatgttgaaggcttaggcgatgcggctgaatctgcttacgccatactcgatgaagtagccggcctcgcgcggcgatcctacgctgaattagtcaacacaccgggtttcgttgactatttccaagcttccacgccggtcagcgagatcggatcgttgaacattggcaaccgaccgacatcacgtaagcctaccacgtcgatcgcggatcttcgtgctattccgtgggtactggcatggagccaatcgcgagtcatgctcccaggttggtatggcaccggatcggcgtttcagcagtgggttgcggctggacccgaaagtgaatcacagcgggtagaaatgctgcatgacctctatcagcgttggccgttctttcgaagtgtgctgtcgaacatggcgcaggtactggccaaaagtgatctgggcctggcggcccgctatgctgagctggtggtcgacgaagccttgcggcgcagagtgtttgacaagatcgccgacgagcatcggcgaaccattgccatccacaagctcattacgggtcatgacgatctgcttgctgacaacccggctctggcgcgttcggtgttcaaccgcttcccgtatctggagccgttaaaccaccttcaggtggagctattgcgccgctaccgctcgggtcacgacgacgaaatggtgcaacgcggcatccttttgacaatgaacggattggccagcgcgctacgtaacagcggc

SEQ ID NO: 38 - DNA, 2736 bp, Streptomyces coelicolor
gtgagcagtgccgacgaccagaccaccacgacgaccagcagtgaactgcgcgccgacatccgccggctgggtgatctcctcggggagaccctggtccggcaggagggccccgaactgctggaactcgtcgagaaggtacgccgactcacccgagaggacggcgaggccgccgccgaactgctgcgcggcaccgaactggagaccgccgccaagctcgtccgcgccttctccacctacttccacctggccaacgtcaccgagcaggtccaccgcggccgcgagctgggcgccaagcgcgccgccgagggcggactgctcgcccgtacggccgaccggctgaaggacgccgaccccgagcacctgcgcgagacggtccgcaacctcaacgtgcgccccgtgttcaccgcgcaccccaccgaggccgcccgccgctccgtcctcaacaagctgcgccgcatcgccgccctcctggacaccccggtcaacgagtcggaccggcgccgcctggacacccgcctcgccgagaacatcgacctcgtctggcagaccgacgagctgcgcgtcgtgcgccccgagcccgccgacgaggcccgcaacgccatctactacctcgacgagctgcacctgggcgccgtcggcgacgtcctcgaagacctcaccgccgagctggagcgggccggcgtcaagctccccgacgacacccgccccctcaccttcggcacctggatcggcggcgaccgcgacggcaaccccaacgtcaccccccaggtgacctgggacgtcctcatcctccagcacgagcacggcatcaacgacgccctggagatgatcgacgagctgcgcggcttcctctccaactccatccggtacgccggtgcgaccgaggaactgctcgcctcgctccaggccgacctggaacgcctccccgagatcagcccccgctacaagcgcctcaacgccgaggagccctaccggctcaaggccacctgcatccgccagaagctggagaacaccaagcagcgcctcgccaagggcaccccccacgaggacggccgcgactacctcggcaccgcccagctcatcgacgacctgcgcatcgtccagacctcgctgcgcgaacaccgcggcggcctgttcgccgacgggcgcctcgcccgcaccatccgcaccctggccgccttcggcctccagctcgccaccatggacgtccgcgagcacgccgacgcccaccaccacgccctcggccagctcttcgaccggctcggcgaggagtcctggcgctacgccgacatgccgcgcgagtaccgcaccaagctcctcgccaaggaactgcgctcccgcaggccgctggcccccagccccgcccccgtcgacgcgcccggcgagaagaccctcggcgtcttccagaccgtccgccgcgccctggaggtcttcggccccgaggtcatcgagtcctacatcatctccatgtgccagggcgccgacgacgtcttcgccgcggcggtactggcccgcgaggccgggctgatcgacctgcacgccggctgggcgaagatcggcatcgtgccgctgctggagaccaccgacgagctgaaggccgccgacaccatcctggaggacctgctcgccgacccctcctaccggcgcctggtcgcgctgcgcggcgacgtccaggaggtcatgctcggctactccgactcctccaagttcggcggtatcaccaccagccagtgggagatccaccgcgcccagcgccggctgcgcgacgtcgcccaccgctacggcgtacggctgcgcctcttccacggccgcggcggcaccgtcggccgcggcggcggccccacccacgacgccatcctcgcccagccctggggcaccctggagggcgagatcaaggtcaccgagcagggcgaggtcatctccgacaagtacctcatccccgccctcgcccgggagaacctggagctgaccgtcgcggccaccctccaggcctccgccctgcacaccgcgccccgccagtccgacgaggccctggcccgctgggacgccgcgatggacgtcgtctccgacgccgcccacaccgcctaccggcacctggtcgaggaccccgacctgccgacctacttcctggcctccaccccggtcgaccagctcgccgacctgcacctgggctcgcggccctcccgccgccccggctcgggcgtctcgctcgacggactgcgcgccatcccgtgggtgttcggctggacccagtcccggcagatcgtccccggctggtacggcgtcggctccggcctcaaggccctgcgcgaggcgggcctggacaccgtgctcgacgagatgcaccagcagtggcacttcttccgcaacttcatctccaacgtcgagatgaccctcgccaagaccgacctgcgcatcgcccagcactacgtcgacaccctcgtcccggacgagctcaagcacgtcttcgacaccatcaaggccgagcacgagctcaccgtcgccgaggtcctgcgcgtcaccggcgagagtgaactgctggacgccgacccggtcctcaagcagaccttcaccatccgcgacgcctacctcgaccccatctcctacctccaggtcgccctcctcggccgtcagcgcgaggccgccgccgcgaacgaggacccggaccccctcctcgcccgagccctcctcctcaccgtcaacggcgtggcagcgggcctgcgcaacaccggctga

SEQ ID NO: 39 - DNA, 2640 bp, Erwinia chrysanthemi
atgaatgaacaatattccgccatgcggagcaatgtcagcatgctgggtaaactactcggcgacaccatcaaggatgcgctgggcgccaatatccttgagcgtgttgaaacaatccgcaagctgtccaaagcctcgcgggccggcagcgaaacacaccgtcaggaactgctgaccacactgcagaacctgtccaacgatgaactgctgccggtcgcccgcgcattcagccagttccttaacctgaccaacaccgccgagcaataccacagtatctctccgcacggcgaagcggccagtaacccggaagcgctggcgacggtgtttcgcagtctgaaaagccgcgacaacctgagcgacaaggatatccgcgacgcggtggagtcgctctccatcgagctggtgttgaccgcgcacccgaccgaaatcacccgccgtacgctgatccacaaactggttgaagtgaatacctgcctcaagcagctcgatcacgacgatctggccgattatgaacgccaccagatcatgcgccgtctgcgccagctgatcgcccaatactggcataccgatgaaatccgcaaaatccgcccgacgccggtggacgaagccaagtggggtttcgcggtggtggaaaatagcctgtgggaaggggtgccggcgtttctgcgcgaactcgacgagcagatgggtaaagagttgggctaccgtctgccggtggattcggtgccggtgcgcttcacctcctggatgggcggcgaccgcgacggcaacccgaacgtgacctctgaagtcacccgccgcgtgctgctgctaagccgctggaaagccgcggacctgttcctgcgcgacgtacaggtgctggtttccgaactgtcgatgaccacctgtacgccggaactgcaacaactggcaggcggcgacgaggtgcaggaaccctaccgcgaactgatgaaagcgctgcgcgcacagttgactgctaccctggattatctggacgcgcgtctgaaagatgaacaacggatgccgcccaaagatctgctggtcaccaacgagcagttatgggaaccgctgtacgcctgttaccagtcgctgcatgcctgcggcatgggcatcatcgccgatggtcaattgctcgataccctgcgccgggtgcgctgctttggcgtgccgctggtgcgtatcgacgtacgtcaggagagcacccgtcacaccgacgcgctggcggaaatcacccgctatctggggctgggagactacgaaagctggtcggaatccgacaagcaggcgttcctgatccgcgaacttaactccaagcgtccgctgctgccgcgccagtgggaaccgagcgccgacacccaggaagtgctggaaacctgccgggtgatcgccgaaaccccgcgcgactccatcgccgcctatgtaatttcgatggcgcgcaccccgtccgacgtgctggcggtgcatttgctgctgaaagaagccggctgtccgtacgcgctgccggtggcgccgctgttcgaaacgctggacgacctgaataacgccgacagcgtaatgatccagttgctcaacatcgactggtatcgcggcttcattcagggcaagcagatggtgatgatcggctattccgactccgccaaagacgccggggtgatggcggcctcctgggcgcagtaccgcgcgcaagacgcactgatcaagacctgcgagaaatacggcatcgccctgacgctgtttcacggtcgcggcggttcgattggccgcggcggcgcgccggctcacgccgcgctgctctcccaaccgccgggcagcctgaaaggcggcctgcgcgtcaccgaacagggcgagatgatccgctttaagttcggcctgccggaagtcaccattagcagcctgtcgctctacacgtccgccattctggaagccaacctgttgccgccgccggagccgaagcaggagtggcatcacatcatgaacgagctgtcgcgcatttcctgcgacatgtaccgcggctacgtacgggaaaacccggatttcgtgccctacttccgtgccgccacgccggagctggaactgggcaaactgccgctggggtcacgtccggccaagcgtcggccgaacggcggcgtggaaagcctgcgcgccatcccgtggattttcgcctggacccagaaccgcctgatgctgcccgcctggttgggcgccggcgccgcgctgcaaaaagtgatcgacgacggtcaccagaaccagctggaagccatgtgccgcgactggccgttcttctccacccgtatcggtatgctggaaatggtattcgccaaggccgacctatggctggcggaatactacgatcagcggctggtggacgagaaactgtggtcgctcggcaaacagctgcgcgaacagctggaaagagacatcaaagcggtgttgaccatctccaacgacgaccatctgatggccgacctgccgtggatcgccgaatccatcgcgctacgcaacgtctacaccgacccgctcaacgtgctgcaggcggagctgctgcaccgttcacgccagcaggaaacactggacccgcaggtggaacaggcgctgatggtcaccatcgccggcgtcgccgccgggatgcgcaataccggctaa

SEQ ID NO: 40 - DNA, 3408 bp, Streptomyces coelicolor
atggtctcgtcacccggcaggctgaagggatcaagaatgttccgcaaggtgctggtcgccaaccgcggtgagatcgcgatccgtgcgtttcgggcgggctacgagctcggcgcgcgcaccgtcgccgtcttcccgcacgaggaccgcaattcgctgcaccggctcaaggccgacgaggcctacgagatcggggagcaggggcatcccgtccgcgcgtacctctccgtggaggagatcgtgcgcgccgcccgccgtgcgggggccgacgccgtctacccgggctacggcttcctgtccgagaaccccgaactcgcccgcgcctgcgaggaggccgggatcaccttcgtcggtcccagcgcccggatcctggaactgaccggcaacaaggcacgggccgtggccgccgcccgcgaggccggagtacccgtgctcggctcctcggcgccctccaccgacgtggacgaactcgtacgcgccgccgacgacgtcggcttccccgtgttcgtcaaggcggtcgcgggcggcggcgggcgcggcatgcgccgcgtcgaggaacccgcccagctgcgcgaggccatcgaggccgcctcccgcgaggccgcgtccgccttcggcgactccaccgtcttcctggagaaggcggtcgtcgaaccccgccacatcgaggtgcagatcctcgccgacggcgagggcgacgtcatccacctcttcgagcgggactgctcggtgcagcgccgccaccagaaggtgatcgagctggcgcccgcgcccaacctcgacccggccctgcgggagcggatctgcgccgacgccgtgaacttcgcccggcagatcggctaccgcaacgcgggcaccgtcgagttcctcgtcgaccgggacggcaaccacgtcttcatcgagatgaacccgcgcatccaggtcgagcacacggtcaccgaggaggtcaccgacgtcgacctggtccagtcccagctgcgcatcgccgccggccagacgctggccgacctcggactcgcccaggagaacatcaccctgcgcggtgccgcactccagtgccgcatcaccaccgaggacccggccaacggcttccgcccggacaccgggcagatcagcgcctaccgttcgccgggcggctccggcatccggctcgacggcggtaccacccacgccggtacggagatcagcgcgcacttcgactcgatgctggtcaagctctcctgccggggacgggacttcaccaccgcggtgaaccgcgcccggcgtgcggtcgccgagttccgcatccgcggcgtcgccaccaacatccccttcctccaggcggtcctggacgaccccgacttccaggccggccgggtcaccacctcgttcatcgaacagcgcccgcacctgctgaccgcccggcactccgccgaccgcggcaccaagctgctgacctacctcgccgacgtcacggtgaacaagccgcacggcgagcgccccgagctggtcgacccgctgaccaagctgccgacggcgtccgccggtgaaccgcccgccgggtcccgccagttgctggccgagctggggccggaggggttcgcccgccgactgcgcgagtcgtccaccatcggcgtcaccgacaccaccttccgcgacgcccaccagtcgctgctcgccacccgggtgcgcaccaaggacatgctcgccgtggcgcccgtcgtcgcccgcaccctgccccagctgctgtccctggagtgctggggcggcgccacctacgacgtcgccctgcgcttcctcgccgaggacccctgggagcggctagccgcgctgcgcgaggcggtgcccaacctctgcctccagatgctgctgcgcggccgcaacaccgtgggctacaccccgtacccgaccgaggtgaccgacgccttcgtgcaggaggccgccgccaccggcatcgacatcttccgcatcttcgacgccctcaacgacgtcgagcagatgcggcccgccatcgaggccgtacggcagaccggcagcgccgtcgccgaggtcgcgctctgctacaccgccgacctgtccgacccctccgagcggctctacaccctcgactactacctgcggctcgccgagcagatcgtgaacgccggagcgcacgtgctggccgtcaaggacatggccgggctgctgcgcgcaccggccgccgcgaccctggtgtccgcgctgcgccgggagttcgacctgccggtgcacctgcacacccacgacaccaccggcggccagctcgccacctacctggccgcgatccaggcgggcgcggacgccgtcgacggtgcggtggcgtccatggcgggcaccacttcgcagccgtcgctgtcggcgatcgtggccgccaccgaccacaccgagcggcccaccggcctcgacctccaggccgtcggcgacctggagccgtactgggagagcgtccgcaaggtctacgccccgttcgaggccggcctggcctccccgaccggccgggtctaccaccacgagattcccggcggccagctctccaacctgcgcacccaggccgtcgcgctcggcctcggcgaccgcttcgaggacatcgaggccatgtacgccgccgccgaccggatgctgggccgcctggtgaaggtcaccccgtcctccaaggtggtcggcgacctggccctgcatctggtgggcgccggtgtctccccggcggacttcgagcaggaccccgaccggttcgacatcccggactccgtggtcggcttcctgcgcggcgagctgggcaccccgcccggcggctggcccgagccgttccgcagcaaggcgctgcgcggccgcgccgaggccaggccgctcgccgagctgtccgaggacgaccgcgacggcctcggcaaggaccgccgggcgacgctcaaccggctgctgttcccgggaccggcccgcgagttcgacacccaccgcgcctcgtacggcgacaccagcatcctcgacagcaaggacttcttctacgggctgcgcccgggcaaggagtacacggtcgacctcgaccccggcgtccggctgctcatcgaactccaggcggtcggcgacgccgacgagcgcggcatgcgcaccgtgatgtcctccctgaacggacagctccgccccatccaggtccgcgaccggtcggccgccaccgacgtcccggtgacggagaaggccgaccgggcgaaccccggccacgtcgcggcgccgttcgccggtgtggtgaccctcgccgtcgccgagggcgacgaggtggaggccggggccaccgtggccaccatcgaggcgatgaagatggaggcgtcgatcacggccccgaagtccggcacggtgaccaggctcgccatcaaccgcatccagcaggtcgagggcggcgatcttctcgtccaactcgcc

SEQ ID NO: 41 - DNA, 3384 bp, Mycobacterium smegmatis
gtgatctccaaggtgctcgtcgccaaccgcggcgaaatcgcgatccgcgcattccgtgctgcgtacgagatgggcatcgccacggtggcggtgtatccgtacgaggaccggaattcgctccatcggctcaaggccgacgagtcatatcagatcggcgaggtgggtcatcccgtccgcgcgtatctgtcggtcgacgagatcatccgcgtcgccaagcattcgggcgccgacgcggtgtacccgggctacggcttcctgtcggagaaccccgatctggcggccaagtgcgccgaggcgggtatcacgttcgtgggaccgtccgccgaggtgctgcagctcacgggtaacaaggcacgcgcgatcgccgcggcgcgcgccgcgggccttcccgtgctgagttcgtcggagccgtcgtcgtcggtggacgagttgatggccgctgccgccgacatggagttcccgctgttcgtcaaggcggtctcgggtggcggcgggcgcggcatgcgccgcgtcaccgaccgcgagtccctggccgaggcgatcgaggcggcctcgcgggaggccgagtcggcgttcggcgacgcgtcggtgtacctggagcaggccgtgctcaacccgcgtcacatcgaggtgcagatcctcgccgacggcgcgggcaacgtcatgcacctgttcgagcgtgactgcagcgtgcagcgcaggcatcagaaggtcgtcgagctggcgcccgcgcccaacctgagtgacgaactgcgccaacagatctgcgccgacgccgtggccttcgcgcgccagatcgggtactcgtgcgcgggcaccgtcgagttcctgctcgacgagcgcggccatcacgtgttcatcgagtgcaatccgcgaatccaggtggagcacacggtgaccgaggagatcaccgacgtggacctggtgtcctcgcagttgcgcatcgccgcgggcgagacgctcgccgatctcggtctgtcccaggaccggctcgtggtgcgtggcgcggccatgcagtgccgcatcaccaccgaggtcccggccaacggcttccgacccgacaccggccgcatcaccgcgtaccgctcgccgggcggcgcgggcatccgcctcgacggcggcaccaacctgggtgcggagatctcggcgcacttcgactccatgctggtcaagctgacgtgccggggacgcgacttctcggccgcggcctcgcgcgcgcgccgcgccctggcggagttccgcatccgcggtgtgtcgaccaacatcccgttcctgcaggcggtcatcgacgatccggacttccgcgccggacgggtgacgacgtcgttcatcgacgaccggccgcatctattgacctcgcggtctcctgccgaccgcggcaccaggatcctcaactacctggccgacatcacggtcaacaagccgcacggcgaacggccttcgacggtttacccgcaggacaagctgccgccgctggatctgcaggcgccgccgcccgcgggatccaaacagcgcctcgtggaactggggcccgagggtttcgcgggctggctgcgcgaatccaaggccgtcggcgtcaccgacacgacgttccgcgacgcgcaccagtcgctgctggccacgcgtgtgcgcaccaccggtctgctgatggtggcgccgtacgtcgcacgctccatgccgcagttgctgtcgatcgagtgctggggcggcgcgacctacgatgtggcccttcgcttcctgaaggaagacccgtgggagcggctggcggcgctgcgcgagagcgtgcccaacatctgcctgcagatgctgctgcggggacgcaacaccgtgggctacacgccgtacccggaactggtcacctcggcgttcgtcgaggaggccgcggcgaccggtatcgacatcttccggatcttcgacgcgctcaacaacgtcgagtcgatgcggcccgcgatcgacgcggtgcgggaaaccggttcgaccatcgccgaagtcgcgatgtgctacacgggcgacctcagcgatcccgcggagaacctctacacgctcgactactacctgaagctggccgagcagatcgtcgaggccggcgcccacgtgctggcgatcaaggacatggccggtctgctgcgcgccccggccgcccacacgctcgtgagcgcgttgcgcagccggttcgatctgcccgtgcacgtgcacacccacgacaccccgggcggtcagctcgcgacgtacctcgcggcgtggtcggccggcgcggacgcggtggacggcgcctcggcgccgatggccgggaccacgagccagcccgcgctgagctcgatcgtcgcggcggccgcgcacacccagtacgacacgggcctggacctgcgtgcggtgtgcgaccttgagccctactgggaggcggtgagaaaggtctacgcgccgttcgagtccgggctgcccgggccaaccggccgcgtctacacccacgagattcccggtgggcagttgagcaacctgcgtcagcaggccatcgcgttgggcctcggcgaccggttcgaggagatcgaggccaattacgctgcggccgaccgggttctgggacggctcgtgaaggtgaccccgtcgtcgaaggtggtcggggacctggcgctggcgctcgtgggtgcgggcatcaccgccgaggagttcgccgaggatcccgcgaagtacgacatccccgacagcgtgatcggcttcctgcgcggtgaactcggggatccgccgggcggatggccggaaccgttgcgcaccaaggcgctccagggccgcggaccggcccggccggtcgagaagctgaccgccgacgacgaggcgttgctcgcccagcccgggcccaagcggcaggccgcgttgaaccgcctgcttttccccgggcccaccgccgagttcgaggcgcaccgcgaaacctacggcgacacctcatccctcagcgcgaaccagttcttctacgggctgcgctacggcgaggagcaccgcgtgcaactcgaacgtggcgtggaactgctgatcgggcttgaggcgatctcggaggccgacgagcgcggcatgcgcaccgtgatgtgcatcatcaacggtcagctgcgcccggttctcgtgcgcgaccgcagcatcgccagcgaggtgcccgccgccgaaaaggccgaccgcaacaatgccgaccacatcgccgcgcccttcgccggtgtggtgaccgtcggtgtcgcagaaggtgactcggtggacgcgggacaaaccatcgcgacgatcgaggcgatgaagatggaggccgccatcaccgcgcccaaggcaggcaccgtcgcgcgcgtcgcggtcgcggcgaccgcccaggtcgagggcggcgatctgctggtggtggtcagctga

SEQ ID NO: 42 - DNA, 975 bp, Thermobifida fusca
atggtaggcagtacgacgccgaacgcgcccttcggccagatgttgaccgcgatgatcacccccatgctcgacaatggggaggtggactacgacggggtggcccgcctcgcgacctacctcgtcgatgagcagcgcaacgacggcctcatcgtcaacggaaccaccggagagtccgccaccaccagcgatgaggagaaggagcgcatcctccgcaccgtgatcgacgcggtcggcgaccgcgccaccatcgttgccggagcgggcagcaacgacaccaggcacagtattgaactcgcgcggaccgcggaacgcgccggagcagacggcctgctgctcgtcaccccctactacaaccggccgccccaagaaggcctgctgcggcacttcacggccattgccgacgccacagggctgccgatcatgctctacgacattcctggccgcacaggcacgccgatcgactccgaaaccctggtccggctcgccgagcacccccgcatcgtcgccaacaaggacgccaaagacgacctcggcgccagctcgtgggtgatgtcccgcaccgacctcgcctactacagcggcagcgacatgctcaacctgccgctgctgtccatcggcgccgcgggcttcgtcagcgtggtcggccatgtcgtcggctccgaactgcacgacatgatcgacgcctaccgggccggggacgtggcccgggctttggacatccaccgccgcctgatccccgtctaccggggcatgttccgcacccagggagtcatcaccactaaggcggtgctcgccatgttcgggctgcccgccggagtggtccgcgcccccctgctcgacgcgtcccccgaactcaaagagctgctccgcgaagacctcgccatggccggggtgaagggccccactggccttgcctccgctcacgaggacgcggccagcgggagggaagcggaacgactcacggaggggaccgca

SEQ ID NO: 43 - DNA, 900 bp, Mycobacterium leprae
gtgaccactgtcggattcgacgtccccgcacgtttggggaccctgcttactgcgatggtgacaccgtttgacgctgatggttctgttgacactgcggctgcgacgcggctggcgaaccgcctggtcgacgcgggttgtgatggtctggtgctctcgggcaccaccggcgagtcgccgaccactactgacgacgagaaactccaactgttgcgtgtcgtacttgaggcggtaggtgaccgagctagagtcatcgccggcgcaggtagttatgacacagctcatagtgtccgactcgtcaaggcctgtgcgggtgagggcgcgcacggacttctggtggttaccccttactactcgaagccgccgcagaccgggctgtttgcgcacttcaccgctgtggccgacgcgactgagctaccagtgttgctctacgacattcccgggcggtcggtcgtgccgatcgagcctgacacgattcgcgcgctggcgtcgcatcccaacatcgtcggagtcaaagaggccaaggctgatttatacagcggtgcccggatcatggctgacaccggcctggcctactattccggcgacgacgcactgaacctgccctggctggcggtgggtgccatcggcttcatcagtgtgatttctcatctagccgcaggacagcttcgagagctgttatccgcttttggttctggggatattaccactgcccgaaagatcaacgtcgcgatcggcccgctgtgcagcgcgatggaccgcttgggtggggtgacgatgtccaaggcaggtctgcggcttcagggtatcgacgtcggtgatccgcggttgccgcagatgccggcaacagcggagcagatcgatgagttggctgtcgatatgcgtgcagcctcggtgcttagg

SEQ ID NO: 44 - DNA, 900 bp, Mycobacterium tuberculosis
gtgaccaccgtcggattcgacgtcgcagcgcgcctaggaaccctgctgaccgcgatggtgacaccgtttagcggcgatggctccctggacaccgccaccgcggcgcggctggccaaccacctggtcgatcaggggtgcgacggtctggtggtctcgggcaccaccggcgagtcgccgaccaccaccgacggggagaaaatcgagctgctgcgggccgtcttggaagcggtgggggaccgggcccgtgttatcgccggtgccggcacctatgacaccgcgcacagcatccggctggccaaggcttgtgcggccgagggtgcgcacgggctgctggtggtcacgccctactattccaagccgccgcagcgggggctgcaagcccatttcaccgccgtcgccgacgcgaccgagctgccgatgctgctctatgacatcccggggcggtcggcggtgccgatcgagcccgacacgatccgcgcgttggcgtcgcatccgaacatcgtcggagtcaaggacgccaaagccgacctgcacagcggcgcccaaatcatggccgacaccggactggcctactattccggcgacgacgcgctcaacctgccctggctggccatgggcgccacgggcttcatcagcgtgattgcccacctggcagccgggcagcttcgagagttgttgtccgccttcggttctggggatatcgccaccgcccgcaagatcaacattgcggtcgccccgctgtgcaacgcgatgagccgcctgggtggggtgacgttgtccaaggcgggcttgcggctgcagggcatcgacgtcggtgatccccggctgccccaggtggccgcgacaccggagcagatcgacgcgttggccgccgacatgcgcgcggcctcggtgcttcgg

SEQ ID NO: 45 - DNA, 897 bp, Streptomyces coelicolor
atggctccgacctccactccgcagacccccttcgggcgggtcctcaccgccatggtcacgcccttcacggcggacggcgcactcgacctcgacggcgcccagcggctcgccgcccacctggtggacgcaggcaacgacggcctgatcatcaacggcaccaccggcgagtccccgaccaccagcgacgcggagaaagcggacctcgtacgggccgtcgtggaggcggtcggcgaccgggcgcacgtggtggccggagtcggcaccaacaacacccagcacagcatcgagctggcccgcgccgccgagcgcgtcggcgcccacggcctgctgctcgtcacgccgtactacaacaagcccccgcaggagggcctgtacctgcacttcacggccatcgccgacgccgccgggctgccggtcatgctctacgacatccccggccgcagcggcgtcccgatcaacaccgagaccctggtccgcctcgcggagcacccgcggatcgtcgccaacaaggacgccaagggcgacctcggccgggccagctgggccatcgcgcgctccggcctcgcctggtactccggcgacgacatgctcaacctgccgctgctcgccgtgggcgcggtcggcttcgtctccgtcgtgggccacgtcgtcaccccggagctgcgcgccatggtggacgcgcacgtcgccggtgacgtacagaaggccctggagatccaccagaagctgctccccgtcttcaccggcatgttccgcacccagggcgtcatgaccaccaagggcgcgctcgccctccagggactgcccgcgggaccgctgcgcgcccccatggtcggcctcacgcccgaggaaaccgagcagctcaagatcgatcttgccgccggcggggtacagctc

SEQ ID NO: 46 - DNA, 879 bp, Erwinia chrysanthemi
atgtttacgggtagtattgttgctctggttacgccgatggacgacaaaggtgccgttgatcgcgcgagcttgaaaaaactgattgattatcatgtcgctagcggaacttccgcgattgtgtcggtgggtaccaccggcgaatccgccaccttgagtcacgatgagcatggcgacgtggtgatgctgacgctggaattgagcgatggccgcatcccggtcatcgccggcaccggcgccaattcgaccgctgaggcgatttccctcacccagcgtttcaacgacacgggcgtggccgggtgcctgaccgtgacgccgtattacaataagccgacccaaaacggcttgttcctgcacttcaaggcgattgccgagcacaccgacctgccgcaaatcctctacaacgtgccgtcccgtaccggttgcgacatgttgccggaaaccgtcgcccgtctgtcggaaatcaaaaatattgtcgcaatcaaggaagcgaccgggaacttaagccgggtcagtcagatccaagagctggttcatgaagatttcattttgctgagcggcgacgacgccagctcgctggacttcatgcaactgggtggcgacggcgtgatttccgtgacagccaacatcgcggcccgcgaaatggcggcgctgtgcgagctggcggcgcaagggaatttcgttgaagcccgccgtctgaatcagcgtctgatgccgctgcatcagaaactgtttgttgaacccaatccgattccggtgaaatgggcctgtaaggcattgggattgatggcgaccgacacgcttcgtctgccgatgacgccgctgaccgatgccggtcgcgacgtgatggagcaggccatgaagcaggcgggtctgctgtaa

SEQ ID NO: 47 - DNA, 1290 bp, Streptomyces coelicolor
atgatgcgtacgcgtccgctgaaggtggcgctgctgggctgtggagtggtcggctcaaaggtggcgcgcatcatgacgacgcacgccgccgacctcgccgcccggatcggggccccggtggagctcgcgggcgtcgccgtacggcggcccgacaaggtgcgggaggggatcgacccggccctcgtcaccaccgacgccaccgcgctcgtcaagcgcggggacatcgacgtcgtcgtcgaggtcatcggggggatcgagcccgcgcggacgctcatcaccaccgccttcgcgcacggcgcctccgtggtctccgccaacaaggcgctcatcgcccaggacggcgccgccctgcacgccgccgccgacgagcacggcaaggacctgtactacgaggccgccgtcgccggtgccatcccgctgatccggccgctgcgcgagtccctcgccggcgacaaggtcaaccgggtgctcggcatcgtcaacgggaccaccaacttcatcctcgacgccatggactcgaccggggccggctatcaggaagcgctcgacgaggccacggccctcgggtacgccgaggccgacccgaccgccgacgtcgagggcttcgacgccgcagccaaggccgccatcctcgccgggatcgccttccacacgcgcgtacgcctcgacgacgtctaccgcgagggcatgaccgaggtcaccgccgccgacttcgcctccgccaaggagatgggctgcaccatcaagctgctcgccatctgcgagcgggcggcggacggagggtcggtcaccgcacgcgtgcatcccgcgatgatcccgctcagccatccgctggccaacgtgcgcgaggcgtacaacgccgtgttcgtggagtccgacgccgccggtcagctcatgttctacgggcccggcgccggcggttcgccgaccgcgtccgccgtgctcggcgacctggtggccgtgtgccgcaaccggctgggcggagcgaccggacccggtgagtccgcgtacgccgccctgcccgtctccccgatgggcgacgtcgtcacgcgctaccacatcagcctcgacgtggccgacaaaccgggcgtgctcgcccaggtcgcgaccgtgttcgcggagcacggtgtctccatcgacaccgtgcggcagtccggcaaggacggcgaggcatccctcgtcgtcgtcacccatcgcgcgtccgacgccgccctcggcggtacggtcgaggcgctgcgcaagctcgacaccgtgcggggtgtcgccagcatcatgcgggttgaaggagag

SEQ ID NO: 48 - DNA, 1119 bp, Mycobacterium smegmatis
atgagtaagaagcccatcggggtagcggtactgggcctggggaacgtcggcagcgaggtcgtgcgcatcatcgccgacagcgcggacgatctcgcggcgcgcatcggtgcgccgctggaactgcgcggcgtcggcgtgcgccgtgtggccgacgaccgcggcgtgcccacggaactgctcaccgacgacatcgacgcgctggtgtcgcgtgacgacgtcgacatcgtcgtcgaggtcatgggccccgtcgaaccggcacgcaaggccatcctgtcggcgctggagcagggcaagtcggtggtcaccgccaacaaggcgctgatggccatgtccaccggcgagctcgcccaggccgccgagaaggcccacgtggacctgtatttcgaggccgcagtggccggcgccatcccggtgatccgcccgctgacccagtcgctggccggtgacacggtgcgccgcgtggccggcatcgtcaacggcaccaccaactacatcctgtccgagatggacagcaccggcgccgattacaccagcgcgctggccgatgcgagcgccctcggttacgccgaggccgatcccaccgccgacgtcgagggctacgacgccgcggccaaggccgcgatcctcgcttcgatcgcgttccacacccgtgtgaccgccgacgacgtgtaccgcgagggcatcaccacggtcagcgccgaggacttcgcgtcggcacgcgcgctgggctgcaccatcaaactgctcgcgatctgcgagcggctcacctccgacgagggcaaggaccgggtctcggcccgcgtctacccggcgctcgtcccgctgacccacccgctggccgcggtcaacggtgcgttcaacgcggtggtggtggaagccgaggcggccgggcggctcatgttctacggtcaaggcgccggcggtgcccccaccgcctttgcggtgatgggagacgtggtcatggcggctcgcaaccgtgtccagggcggccgtggcccgcgcgaatcgaagtacgccaagctgccgatcgcgcccatcgggttcatcccgacgcgctactacgtcaacatgaacgtggccgaccggcccggcgtgttgtccgctgtggcagccgaattc

SEQ ID NO: 49 - DNA, 1848 bp, Thermobifida fusca
atgcgccgcccagaacctgccggtgccgcggatcgcggtcgaacccggccgcgccatcgccggaccggcgggcatcaccctctacgaggtcggcacggtcaaggacgtggaggggatccgcacctatgtcagtgtcgacggcggtatgagcgacaacatccgcaccgcgctgtacggtgcggagtacacctgtgtgctggcctcgcggcacagcgacgccgagccgatgctgtcccgcctggtcggcaagcactgcgagagcggcgacatcgtcgtgcgcgacctctacctccctgccgacctgcgtcccggcgacctggtagcagtggccgccaccggcgcctactgctactccatggccagcaactacaaccacgtgccccggcctgccgtggtcgcggtccgcgagaagaacgcccgcgtcctggtgcgacgggaaaccgaagaagacctgttgcggctggacgtaggctgagcagtggccgacgacgctctggccaccacgacgaggttctggatacggacaatgaacgacgaaacgggagtcaccccctcatggcactgaaggtggcgctgctgggttgcggcgttgtgggttctcaggtggtccggctgctcaacgagcagtcgcgtgaacttgcggagcgcatcggaacgcccctggagatcggaggcatcgcggtgcgccgcctggaccgcgcccgggggacgggcgtggaccccgacctcctcaccaccgacgccatgggtcttgtgaccagagacgacatcgacctcgtggtggaggtcatcggcggcatcgagcccgcccggtcgctcatcctggccgcgatccagaagggcaagtctgtggtgaccgccaacaaggcgctgctcgccgaggacggcgcgaccatccacgccgctgcccgggaagcgggagttgacgtgtactacgaggccagcgtcgccggggccatcccgctgctgcggccgctgcgtgactccctggccggggaccgcgtcaaccgggtcttgggcatcgtcaacggcaccaccaactacatcctggaccggatggacagcctgggcgccggcttcaccgagtcactggaggaagcccaggccctgggatacgccgaagccgacccgaccgccgacgtggagggcttcgacgccgccgctaaagccgcgatcctggcccggctcgccttccacacaccggtgaccgctgccgatgtgcaccgcgaaggcatcaccgaggtctccgcggccgacatcgccagcgccaaggccatgggctgcgtggtgaaactcctcgcgatctgccagcgctccgacgacggctccagcatcggcgtgcgcgtccacccggtgatgctgccccgcgaacacccgctcgccagcgtcaaaggcgcctacaacgcggtgttcgtggaagccgagtccgccgggcagctcatgttctacggcgcgggcgcgggaggcgtccccaccgccagcgcagtcctcggcgacctggtcgcggtggcacggaaccgcctggcccgcactttcgtggccgacggccgggccgacgcgaaactgcccgtccaccccatgggggagaccatcaccagctaccacgtggcgctggacgttgccgaccggcccggcgtgctcgccggggtcgccaaagtcttcgcggccaacggcgtgtcgatcaagcacgtccgccaggaaggccgcggggacgacgcccagctcgtcctggtcagccacaccgcgccggatgccgccctggcccggaccgtggagcaactgcgcaaccacgaggacgtccgcgcggtcgccagcgtgatgcgggtcgaaaccttcgacaacgaacga

SEQ ID NO: 50 - DNA, 1137 bp, Mycobacterium tuberculosis
atgacgatctccgatgtacccacccagacgctgcccgccgaaggcgaaatcggcctgatagacgtcggctcgctgcaactggaaagcggggcggtgatcgacgatgtctgtatcgccgtgcaacgctggggcaaattgtcgcccgcacgggacaacgtggtggtggtcttgcacgcgctcaccggcgactcgcacatcactggacccgccggacccggccaccccacccccggctggtgggacggggtggccgggccgggtgcgccgattgacaccacccgctggtgcgcggtagctaccaatgtgctcggcggctgccgcggctccaccgggcccagctcgcttgcccgcgacggaaagccttggggctcaagatttccgctgatctcgatacgtgaccaggtgcaggcggacgtcgcggcgctggccgcgctgggcatcaccgaggtcgccgccgtcgtcggcggctccatgggcggcgcccgggccctggaatgggtggtcggctacccggatcgggtccgagccggattgctgctggcggtcggtgcgcgtgccaccgcagaccagatcggcacgcagacaacgcaaatcgcggccatcaaagccgacccggactggcagagcggcgactaccacgagacggggagggcaccagacgccgggctgcgactcgcccgccgcttcgcgcacctcacctaccgcggcgagatcgagctcgacacccggttcgccaaccacaaccagggcaacgaggatccgacggccggcgggcgctacgcggtgcaaagttatctggaacaccaaggagacaaactgttatcccggttcgacgccggcagctacgtgattctcaccgaggcgctcaacagccacgacgtcggccgcggccgcggcggggtctccgcggctctgcgcgcctgcccggtgccggtggtggtgggcggcatcacctccgaccggctctacccgctgcgcctgcagcaggagctggccgacctgctgccgggctgcgccgggctgcgagtcgtcgagtcggtctacggacacgacggcttcctggtggaaaccgaggccgtgggcgaattgatccgccagacactgggattggctgatcgtgaaggcgcgtgtcggcgg

SEQ ID NO: 51 - DNA, 1149 bp, Mycobacterium leprae
atgacaatctccaaggtccctacccagaagctgccggccgaaggcgaggtcggcttggtcgacatcggctcacttaccaccgaaagcggtgccgtcatcgacgatgtctgcatcgccgttcagcgctggggggaattgtcgcccacgcgagacaacgtagtgatggtactgcatgcactcaccggtgactcgcacatcaccgggcccgccggaccgggacatcccacacccggctggtgggactggatagctggaccgggtgcaccaatcgacaccaaccgctggtgcgcgatagccaccaacgtgctgggcggttgccgtggctccaccggccctagttcgcttgcccgcgacggaaagccttggggttcaagatttccgctgatatctatacgcgaccaggtagaggcagatatcgctgcactggccgccatgggaattacaaaggttgccgccgtcgttggaggatctatgggcggggcgcgtgcactggaatggatcatcggccacccggaccaagtccgggccgggctgttgctggcggtcggtgtgcgcgccaccgccgaccagatcggcacccaaaccacccaaatcgcagccatcaagacagacccgaactggcaaggcggtgactactacgagacagggagggcaccagagaacggcttgacaattgcccgccgcttcgcccacctgacctaccgcagcgaggtcgagctcgacacccggtttgccaacaacaaccaaggcaatgaggacccggcgacgggcgggcgttacgcagtgcagagttacctagagcaccagggtgacaagctattggcccgctttgacgcaggcagctacgtggtcttgaccgaaacgctgaacagccacgacgttggccggggccgcggagggatcggtacagcgctgcgcgggtgcccggtaccggtggtggtgggtggcattacctcggatcggctctacccactgcgcttgcagcaggagctggccgagatgctgccgggctgcaccgggctgcaggttgtagactccacctacgggcacgacggcttcctggtggaatccgaggccgtcggcaaattgatccgtcaaaccctcgaattggccgacgtgggttccaaggaagacgcgtgttcgcaatga

SEQ ID NO: 52 - DNA, 1137 bp, Thermobifida fusca
gtgagtcacgacaccacccctccccttcccgcgaccggcgcgtggcgggaaggggaccctccgggcgaccggcgctgggtcgaactgtccgaacctctgccgctggagaccgggggtgaacttcccggggtccgcctggcctacgagacgtggggcagtctcaacgaggaccgctccaacgcggtcctcgtgctgcacgccctcaccggcgacagccacgtcgtaggcccggaaggccccgggcaccccagcccaggctggtgggaaggcatcatcggccccgggctggcactcgacaccgaccggtacttcgtggtcgcccccaacgtgctgggcggctgccaaggcagcaccgggccgtcgtcgaccgcgcccgacggcaggccgtgggggtcccggttcccgaggatcaccatccgcgacacggtgcgcgccgagttcgccctgctgcgcgaattcggcatccactcgtgggccgcggtcctcggcgggtccatgggcgggatgcgtgccctcgaatgggcggccacctacccggagcgggtgcgtcgcctcctgctgctggccagccctgcggccagctccgcacagcagatcgcctgggccgccccccagttgcacgccatccggtctgatccgtactggcacggtggcgactactacgaccgtcccggtccgggaccggtcaccggcatggggatcgcccgccgtatcgcgcacatcacctaccggggtgccaccgagttcgacgaacggttcggccgcaacccccaagacggggaagacccgatggccgggggccggttcgctgtcgagtcgtacctggaccaccacgcggtcaaactcgcccgccggttcgacgcgggcagctacgtcgtgctcacccaagccatgaacacccacgacgtgggtcggggccgcggcggggtggcgcaggcgctgcgccgggtcaccgcccgcaccatggtggccggggtgagcagcgacttcctgtaccccctcgcccagcagcaggagctcgccgacggtattcccggggccgacgaagtccgcgtcatcgaatcagcctcgggccacgacgggttcctcaccgagatcaaccaagtgtcggtcctcatcaaagaactgctggcgcag

SEQ ID NO: 53 - DNA, 1359 bp, Thermobifida fusca
gtggcactgcgtcctgacaggagcatcatgaccgctgaagacaccacgcctgaatccaccgcggccgacaagtggtcgttcgaaaccaagcagatccacgccggagcggcccccgatccggccaccaacgcacgggccacccccatctaccagaccacgtcgtacgtcttccgggacacgcagcacggggccgacctgttctcgctcgcagagccgggcaacatctacacgcggatcatgaaccccacccaggacgtgctggaaaagcgggtcgcggctctggaaggcggggtcgccgcggtcgcgttcgcgtccgggtcagctgccatcaccgctgccgtcctcaacctggcgggtgcgggtgaccacatcgtgtccagcccgtccctgtacggcggcacctacaacctgttccgctacaccctgcccaagctcggcatcgaggtcaccttcatcaaagaccaggacgacctcgacgagtggcgtgccgcggcccgcgacaacaccaagctgttcttcgcggaaaccctgcccaacccggcgaacaacgtgctcgacgtgcgcgcggtggcggacgtcgcccacgaggtcggtgtgccgctcatggtcgacaacaccgtgcccaccccctacctgcagcggcccatcgaccacggcgcggacatcgtggtgcactcggccaccaagttcctcggcggccacggcaccacgatcgcgggcatcgtggtggacgccggcaccttcgacttcggcgcccacggcgaccggttccccggcttcgtcgaacccgaccccagctaccatggcctgaagtactgggaggcgctgggaccgggtgcctacgctgccaagctgcgggtgcaactgctccgcgacacgggcgcggccatctcgccgttcaacagcttcctgatcctccaggggatcgaaacgctgtcgctgcgcatggaacggcacgtcgccaacgcccaggcgctcgccgagtggctggaatcccgcgacgaggtggcgaaggtctactacccgggcctgccttccagcccctactacgaggctgcaaagaagtacctgcccaagggggcgggtgcgatcgtctcctttgagctgcacggcggtatcgaggccggacgcgccttcgtggacggcaccgaactgttcagccagctcgtcaacatcggtgacgtgcgcagcctcatcgtccacccggccagcaccacgcacagccagctcacccccgaagagcagctcgccagcggggtcactcccggcctcgtgcggctgtccgtgggcttggaacacgttgacgaccttcgcgcagacttggaggccgggctgcgcgcagccaaggcataccagtga

SEQ ID NO: 54 - DNA, 1350 bp, Mycobacterium tuberculosis
atgagcgccgacagcaatagcaccgacgccgatccgaccgcgcattggtcgttcgaaaccaaacagatacacgctggtcagcaccctgatccgaccaccaacgcccgggctctgccgatctatgcgaccacgtcgtacaccttcgacgacaccgcgcacgccgccgccctgttcggactggaaattccgggcaatatctacacccggatcggcaaccccaccaccgacgtcgtcgagcagcgcatcgccgcgctcgagggcggtgtggccgcgctgttcctgtcgtcggggcaggccgcggagacgttcgccatcttgaacctggccggcgcgggcgatcacatcgtgtccagcccgcgcctgtacggcggcacctacaacctgttccactattcgctggccaagctcggcatcgaggtcagcttcgtcgacgatccggacgatctggacacctggcaggcggcggtacggcccaacaccaaggcgttcttcgccgagaccatctccaacccgcagatcgacctgctggacaccccggcggtttccgaggtcgcccatcgcaacggggtgccgttgatcgtcgacaacaccatcgccacgccatacctgatccaaccgttggcccagggcgccgacatcgtcgtgcattcggccaccaagtacctgggcgggcacggtgccgccatcgcgggtgtgatcgtcgacggcggcaacttcgattggacccagggccgcttccccggcttcaccacccccgaccccagctaccacggcgtggtgttcgccgagctgggtccaccggcgtttgcgctcaaagctcgagtgcagctgctccgtgactacggctcggcggcttcgccgttcaacgcgttcttggtggcgcagggtctggaaacgctgagcctgcggatcgagcggcacgtcgccaacgcgcagcgcgtcgccgagttcctggccgcccgcgacgacgtgctttcggtcaactatgcggggctgccctcctcgccctggcatgagcgggccaagaggctggcgcccaagggaaccggggccgtgctgtccttcgagttggccggcggcatcgaggccggcaaggcattcgtgaacgcgttgaagctgcacagccacgtcgccaacatcggtgacgtgcgctcgctggtgatccacccggcatcgaccactcatgcccagctgagcccggccgagcagctggcgaccggggtcagcccgggcctggtgcgtttggctgtgggcatcgaaggtatcgacgatatcctggccgacctggagcttggctttgccgcggcccgcagattcagcgccgacccgcagtccgtggcggcgttctga

SEQ ID NO: 55 - DNA, 1212 bp, Mycobacterium tuberculosis
gtgagcgaaaagggtcggctgtttaccagtgagtcggtgacagagggacatcccgacaagatctgtgacgccatcagcgactcggttctggacgcgcttctagcggcggacccgcgctcacgtgtcgcggtcgagacgctggtgaccaccgggcaggtgcacgtggtgggtgaggtgaccacctcggctaaggaggcgtttgccgacatcaccaacacggtccgcgcacggatcctcgagatcggctacgactcgtcggacaagggtttcgacggggcgacctgcggggtgaacatcggcatcggcgcacagtcacccgacatcgcccagggggtcgacaccgcccacgaggcccgggtcgagggcgcggccgatccgctggactcccagggcgccggtgaccagggcctgatgttcggctacgcgatcaatgccaccccggaactgatgccactgcccatcgcgctggcccaccgactgtcgcggcggctgaccgaggtccgcaagaacggggtgctgccctacctgcgtccggatggcaagacgcaggtcactatcgcctacgaggacaacgttccggtgcggctggataccgtggtcatctccacccagcacgcggccgatatcgacctggagaagacgcttgatcccgacatccgggaaaaggtgctcaacaccgtgctcgacgacctggcccacgaaaccctggacgcgtcgacggtgcgggtgctggtgaacccgaccggcaagttcgtgctcggcgggccgatgggcgatgccgggctcaccggccgcaagatcatcgtcgacacctacggcggctgggcccgccacggcggcggcgccttctccggcaaggatccgtccaaggtggaccggtcggcggcgtacgcgatgcgctgggtggccaagaatgtcgtcgccgccgggttggctgaacgggtcgaggtgcaggtggcctacgccatcggtaaagcggcacccgtcggcctgttcgtcgagacgttcggtaccgagacggaagacccggtcaagatcgagaaggccatcggcgaggtattcgacctgcgccccggtgccatcatccgcgacctgaacctgttgcgcccgatctatgcgccgaccgccgcctacgggcacttcggccgcaccgacgtcgaattaccgtgggagcagctcgacaaggtcgacgacctcaagcgcgccatctag

SEQ ID NO: 56 - DNA, 1209 bp, Mycobacterium leprae
gtgagtgagaagggtcggctgttcactagcgagtcggtgactgagggacatcccgacaagatctgtgatgcgatcagcgactcgatccttgacgcacttttggcggaggatccttgctcacgtgtcgcggtcgagacgttggtcaccaccgggcaggtgcatgtggtgggtgaagtgacgacgttggccaagacggcgttcgctgatatcagtaatacggtccgcgaacgtattctcgatatcggctacgactcgtcggacaagggcttcgatggggcgtcgtgcggagttaacattggcatcggcgctcagtcgtctgacattgctcaaggcgtcaataccgcccatgaagtacgcgtcgagggcgcggcggatccgctggacgcccagggtgctggtgaccaaggcctgatgttcggttacgcgatcaatgacaccccggaactgatgccgctaccgattgcactggcccaccgactggcgcgaaggctgaccgaggtacgcaagaacggcgtgctgccctacctgcgttccgacggcaagacccaggtcactatcgcctacgaggacaatgtcccagtgcgtttggacactgtggtcatctccactcagcacgccgctggtgtcgacctggatgccacgctggctcctgatatccgggagaaggtgctcaacaccgttattgacgatctgtctcatgacaccttggatgtatcgtcggtgcgggtgctggtaaacccgaccggcaagttcgtgctaggtgggccgatgggcgatgccgggctcaccggtcgcaagatcatcgtcgacacctacggtggctgggcgcgtcacggcggcggcgccttctctggcaaggatccgtccaaggtggaccggtcggcagcctacgcgatgcgctgggtggccaagaacatcgtcgctgccgggctggcggagcgaatcgaggtgcaggtggcatacgccatcggcaaagccgccccggtcggtttgttcgtcgagacctttggcactgaggcggtcgatccggccaaaatcgagaaagccatcggcgaggtgttcgatctgcgtcccggcgcgatcatccgcgacctgcatctgctgcgcccaatttacgcgcaaaccgctgcctatgggcacttcggtcgcactgacgtcgaactgccatgggagcagctcaacaaagtcgacgatctcaagcgcgccatc

SEQ ID NO: 57 - DNA, 1194 bp, Thermobifida fusca
gtgtcccgtcgacttttcacctccgagtcggtcaccgaaggccaccccgacaagatcgctgaccagatcagtgacgcgatcctcgactcgatgctcagggatgacccccacagccgggtcgcggtggagaccctcatcacgaccggcctggtccacgtcgccggcgaagtgaccacatccacctacgtcgacattcccaccatcatccgcgagaagatcctggagatcggctacgactcctcggccaaggggttcgacggcgcctcctgcggagtgtccgtgtcgatcggcgggcagtcacccgacatcgcccagggcgtcgacaacgcctacgaggcccgggaggaagagatcttcgacgacctcgaccggcagggcgcaggcgaccaaggcctcatgttcggctacgccaacaacgagaccccggagctgatgccgctgccgatcacgctggcccacgccctgtcgcagcgactcgctgaagtgcgccgcgacgggaccatcccctacctgcggcccgacggcaagacccaggtcaccgtggagtacgacgggaaccggcccgtccggttggacaccgtggtggtctccagccagcacgcgcccgacatcgacctgcgggaactgctcaccccggacatcaaggagcacgtggtcgacccggtagtggcccgctacaacctggaggccgacaactaccgactgctcgtcaaccccaccggacggttcgagatcggcggcccgatgggtgacgccgggctgaccggccgcaagatcatcgtcgacacctacggcggctacgcccgccacggcggtggcgcgttctccggcaaggacccgtccaaggtggaccgctccgccgcgtacgccacccgctgggtcgcgaagaacatcgtcgccgccgggctcgccgaccgagtcgaagtccaggtcgcctacgcgatcggcaaagcccacccggtcggcgtgttcctggagaccttcggcaccgagaaggtcgccccggagcagttggagaaggcggtgctggaggtcttcgacctgcgtcccgccgcgatcatccgcgacctggacctgctgcgccccatctactcccagacctcggtctacggccacttcggccgggagctgcccgacttcacctgggagcgcaccgaccgcgtcgacgctctcaaggctgccgtgggcgcctga

SEQ ID NO: 58 - DNA, 1209 bp, Streptomyces coelicolor
gtgtcccgtcgcctgttcacctcggagtccgtgaccgaaggtcaccccgacaagatcgctgaccagatcagcgacacgattctcgacgcgcttctgcgcgaggacccgacctcccgggtcgccgtcgaaaccctgatcaccaccggtctggtgcacgtggccggcgaggtcaccaccaaggcctacgcggacatcgccaacctggtccgcggcaagatcctggagatcggctacgactcctccaagaagggcttcgacggcgcctcctgcggcgtctcggtctccatcggcgcgcagtccccggacatcgcgcagggcgtcgacacggcgtacgagaaccgggtggagggcgacgaggacgagctggaccgccagggtgccggcgaccagggcctgatgttcggctacgcgtccgacgagacgccgacgctgatgccgctgccggtcttcctggcgcaccgcctgtccaagcgcctgtccgaggtccgcaagaacggcaccatcccgtacctgcgtccggacggcaagacccaggtcaccatcgagtacgacggcgacaaggccgtccgtctggacacggtcgtcgtctcctcccagcacgcgagcgacatcgacctggagtcgctgctggcgccggacatcaaggagttcgtcgtcgagccggagctgaaggcgctcctcgaggacggcatcaagatcgacacggagaactaccgcctcctggtcaacccgaccggccgcttcgagatcggcggcccgatgggcgacgccggtctgaccggccgcaagatcatcatcgacacctacggcggcatggcccggcacggcggcggcgccttctccggcaaggacccgtcgaaggtcgaccgctccgcggcgtacgcgatgcgctgggtcgccaagaacgtcgtggccgcgggtctcgccgcgcgctgcgaggtccaggtcgcctacgccatcggcaaggccgagcccgtgggtctgttcgtggagaccttcggtaccgccaaggtcgacaccgagaagatcgagaaggcgatcgacgaggtcttcgacctgcgcccggccgccatcatccgcgctctcgacctgctccgcccgatctacgcccagaccgcggcgtacggtcacttcggccgtgagctgcccgacttcacgtgggagcgcaccgaccgcgtggacgcgctgcgcgaggccgcgggcctgtaa

SEQ ID NO: 59 - protein, 390 aa, Mycobacterium tuberculosis
MQDSIFNLLTEEQLRGRNTLKWNYFGPDVVPLWLAEMDFPTAPAVLDGVRACVDNEEFGYPPLGEDSLPRATADWCRQRYGWCPRPDWVRVVPDVLKGMEVVVEFLTRPESPVALPVPAYMPFFDVLHVTGRQRVEVPMVQQDSGRYLLDLDALQAAFVRGAGSVIICNPNNPLGTAFTEAELRAIVDIAARHGARVIADEIWAPVVYGSRHVAAASVSEAAAEVVVTLVSASKGWNLPGLMCAQVILSNRRDAHDWDRINMLHRMGASTVGIRANIAAYHHGESWLDELLPYLRANRDHLARALPELAPGVEVNAPDGTYLSWVDFRALALPSEPAEYLLSKAKVALSPGIPFGAAVGSGFARLNFATTRAILDRAIEAIAAALRDIID

SEQ ID NO: 60 - protein, 417 aa, Bifidobacterium longum
MSMNNIPQSTTVSNATADVSCFDANHIDVTTIEDLKQVGSDKWTRYPGCIGAFIAEMDYGLAPCVAEAIEEATERGALGYIPDPWKKEVARSCAAWQRRYGWDVDPTCIRPVPDVLEAFEVFLREIVRAGNSIVVPTPAYMPFLSVPRLYGVEVLEIPMLCAGASESSGRNDEWLFDFDAIEQAFANGCHAFVLCNPHNPIGKVLTREEMLRLSDLAAKYNVRIFSDEIHAPFVYQGHTHVPFASINRQTAMQAFTSTSASKSFNIPGTKCAQVILTNPDDLELWMRNAEWSEHQTATIGAIATTAAYDGGAAWFEGVMAYIERNIALVNEQMRTRFAKVRYVEPQGTYIAWLDFSPLGIGDPANYFFKKANVALTDGRECGEVGRGCVRMNFAMPYPLLEECFDRMAAALEADGLL

SEQ ID NO: 61 - protein, 387 aa, Lactobacillus plantarum
MQYDFNKVINRRGTYSTQWDYIQDRFGRSDILPFSISDTDFPVPVGVQEALEQRIKHPIYGYTRWNNEDYKNSIINWFSSQNQVTINPDWILYSPSVVFSIATFIRMKSAVGESVAVFTPMYDAFYHVIEDNQRVLAPVRLGSAQQDYSIDWDTLKAVLKQTATKILLLTNPHNPTGKVFSDDELKHIVALCQQYNVFIISDDIHKDIVYQKAAYTPVTEFTTKNVVLCCSATKTFNTPGLIGAYLFEPEAELREMFLCELKQKNALSSASILGIESQMAAYNTGSDYLVQLITYLQNNFDYLSTFLKSQLPEIRFKQPEATYLAWMDVSQLGLTAEKLQDKLVNTGRVGIMSGTTYGDSHYLRMNIACPISKLQEGLKRMEYGIRS

SEQ ID NO: 62 - protein, 461 aa, Streptomyces coelicolor
MPAVPERAPVTTRSETQSTLDHLLTEIELRNPAQPEFHQAAHEVLETLAPVVAARPEYAEPGLIERLVEPERQVMFRVPWQDDQGRVRVNRGFRVEFNSALGPYKGGLRFHPSVNLGVIKFLGFEQIFKNALTGLGIGGGKGGSDFDPHGRSDAEVMRFCQSFMTELYRHIGEHTDVPAGDIGVGGREIGYLFGQYRRITNRWESGVLTGKGQGWGGSLIRPEATGYGNVLFAAAMLRERGEDLEGQTAVVSGSGNVAIYTIEKLTALGANAVTCSDSSGYVVDEKGIDLDLLKQIKEVERGRVDAYAERRGASARFVPGGSVWDVPADLALPSATQNELDENAAATLVRNGVKAVSEGANMPTTPEAVHLLQKAGVAFGPGKAANAGGVAVSALEMAQNHARTSWTAARVEEELADIMTSIHTTCHETAERYDAPGDYVTGANIAGFERVADAMLAQGVI

SEQ ID NO: 63 - protein, 460 aa, Thermobifida fusca
MRPEPEATMSANLDEKLSPIYEEILRRNPGEVEFHQAVREVLECLGPVVAKNPDISHAKIIERLCEPERQLIFRVPWMDDSGEIHVNRGFRVEFSSSLGPYKGGLRFHPSVNLSIIKFLGFEQIFKNSLTGLPIGGAKGGSDFDPKGRSDAEIMRFCQSFMTELYRHLGEHTDVPAGDIGVGQREIGYLFGQYKRITNRYESGVFTGKGLSWGGSQVRREATGYGCVLFTAEMLRARGDSLEGKRVSVSGSGNVAIYAIEKAQQLGAHVVTCSDSNGYVVDEKGIDLELLKQVKEVERGRVSDYAKRRGSHVRYIDSSSSSVWEVPCDIALPCATQNELTGRDAITLVRNGVGAVAEGANMPTTPEGIRVFAEAGVAFAPGKAANAGGVATSALEMQQNASRDSWSFEYTEKRLAEIMRHIHDTCYETAERYGRPGDYVAGANIAAFEIVAEAMLAQGLI

SEQ ID NO: 64 - protein, 448 aa, Lactobacillus plantarum
MSQATDYVQHVYQVIEHRDPNQTEFLEAINDVFKTITPVLEQHPEYIEANILERLTEPERIIQFRVPWLDDAGHARVNRGFRVQFNSAIGPYKGGLRLHPSVNLSIVKFLGFEQIFKNALTGLPIGGGKGGSDFDPKGKSDNEIMRFCQSFMTELSKYIGLDTDVPAGDIGVGGREIGFLYGQYKRLRGADRGVLTGKGLNYGGSLARTEATGYGLAYYTNEMLKANQLSFPGQRVAISGAGNVAIYAIQKVEELGGKVITCSDSNGYVIDENGIDFKIVKQIKEVERGRIKDYADRVASASYYEGSVWDAQVAYDIALPCATQNEISGDQAKNLIANGAKVVAEGANMPSSPEAIATYQAASLLYGPAKAANAGGVAVSALEMSQNSMRLSWTFEEVDNRLKQIMQDIFAHSVAAADEYHVSGDYLSGANIAGFTKVADAMLAQGLV

SEQ ID NO: 65 - protein, 326 aa, Bacillus sphaericus
MSAIRVGIVGYGNLGRGVEFAISQNPDMELVAVFTRRDPSTVSVASNASVYLVDDAEKFQDDIDVMILCGGSATDLPEQGPHFAQWFNTIDSFDTHAKIPEFFDAVDAAAQKSGKVSVISVGWDPGLFSLNRVLGEAVLPVGTTYTFWGDGLSQGHSDAVRRIEGVKNAVQYTLPIKDAVERVRNGENPELTTREKHARECWVVLEEGADAPKVEQEIVTMPNYFDEYNTTVNFISEDEFNANHTGMPHGGFVIRSGESGANDKQILEFSLKLESNPNFTSSVLVAYARAAHRLSQAGEKGAKTVFDIPFGLLSPKSAAQLRKELL

SEQ ID NO: 66 - protein, 534 aa, Thermobifida fusca
MATQAPEPLPADQIDIRTTAGKLADLQRRRYEAVHAGSERAVAKQHAKGKMTARERIDALLDPGSFVEFDAFARHRSTNFGLEKNRPYGDGVVTGYGTIDGRPVAVFSQDVTVFGGSLGEVYGEKIVKVLDHALKTGCPVIGINEGGGARIQEGVVALGLYAEIFKRNTHASGVIPQISLVMGAAAGGHVYSPALTDFIVMVDQTSQMFITGPDVIKTVTGEDVTMEELGGARTHNTKSGVAHYMASDEHDALEYVKALLSYLPSNNLDEPPVEPVQVTLEVTEEDRELDTFIPDSANQPYDMRRVIEHIVDDGEFLEVHELFAQNIIVGFGRVEGHPVGVVANQPMNLAGCLDIDASEKAARFVRTCDAFNIPVLTLVDVPGFLPGTDQEFGGIIRRGAKLLYAYAEATVPLVTIITRKAFGGAYDVMGSKHLGADINLAWPTAQIAVMGAQGAVNILHRRTLAAADDVEATRAQLIAEYEDTLLNPYSAAERGYVDSVIMPSETRTSVIKALRALRGKRKQLPPKKHGNIPL

SEQ ID NO: 67 - protein, 530 aa, Streptomyces coelicolor
MSEPEEQQPDIHTTAGKLADLRRRIEEATHAGSARAVEKQHAKGKLTARERIDLLLDEGSFVELDEFARHRSTNFGLDANRPYGDGVVTGYGTVDGRPVAVFSQDFTVFGGALGEVYGQKIVKVMDFALKTGCPVVGINDSGGARIQEGVASLGAYGEIFRRNTHASGVIPQISLVVGPCAGGAVYSPAITDFTVMVDQTSHMFITGPDVIKTVTGEDVGFEELGGARTHNSTSGVAHHMAGDEKDAVEYVKQLLSYLPSNNLSEPPAFPEEADLAVTDEDAELDTIVPDSANQPYDMHSVIEHVLDDAEFFETQPLFAPNILTGFGRVEGRPVGIVANQPMQFAGCLDITASEKAARFVRTCDAFNVPVLTFVDVPGFLPGVDQEHDGIIRRGAKLIFAYAEATVPLITVITRKAFGGAYDVMGSKHLGADLNLAWPTAQIAVMGAQGAVNILHRRTIADAGDDAEATRARLIQEYEDALLNPYTAAERGYVDAVIMPSDTRRHIVRGLRQLRTKRESLPPKKHGNIPL

SEQ ID NO: 68 - protein, 548 aa, Mycobacterium tuberculosis
MTSVTDRSAHSAERSTEHTIDIHTTAGKLAELHKRREESLHPVGEDAVEKVHAKGKLTARERIYALLDEDSFVELDALAKHRSTNFNLGEKRPLGDGVVTGYGTIDGRDVCIFSQDATVFGGSLGEVYGEKIVKVQELAIKTGRPLIGINDGAGARIQEGVVSLGLYSRIFRNNILASGVIPQISLIMGAAAGGHVYSPALTDFVIMVDQTSQMFITGPDVIKTVTGEEVTMEELGGAHTHMAKSGTAHYAASGEQDAFDYVRELLSYLPPNNSTDAPRYQAAAPTGPIEENLTDEDLELDTLIPDSPNQPYDMHEVITRLLDDEFLEIQAGYAQNIVVGFGRIDGRPVGIVANQPTHFAGCLDINASEKAARFVRTCDCFNIPIVMLVDVPGFLPGTDQEYNGIIRRGAKLLYAYGEATVPKITVITRKAYGGAYCVMGSKDMGCDVNLAWPTAQIAVMGASGAVGFVYRQQLAEAAANGEDIDKLRLRLQQEYEDTLVNPYVAAERGYVDAVIPPSHTRGYIGTALRLLERKIAQLPPKKHGNVPL

SEQ ID NO: 69 - protein, 549 aa, Mycobacterium leprae
MTSVTDHSAHSMERAAEHTINIHTTAGKLAELHKRTEEALHPVGAAAFEKVHAKGKFTARERIYALLDDDSFVELDALARHRSTNFGLGENRPVGDGVVTGYGTIDGRDVCIFSQDVTVFGGSLGEVYGEKIVKVQELAIKTGRPLIGINDGAGARIQEGVVSLGLYSRIFRNNILASGVIPQISLIMGAAAGGHVYSPALTDFVVMVDQTSQMFITGPDVIKTVTGEDVTMEELGGAHTHMAKSGTAHYVASGEQDAFDWVRDVLSYLPSNNFTDAPRYSKPVPHGSIEDNLTAKDLELDTLIPDSPNQPYDMHEVVTRLLDEEEFLEVQAGYATNIVVGLGRIDDRPVGIVANQPIQFAGCLDINASEKAARFVRVCDCFNIPIVMLVDVPGFLPGTEQEYDGIIRRGAKLLFAYGEATVPKITVITRKAYGGAYCVMGSKNMGCDVNLAWPTAQIAVMGASGAVGFVYRKELAQAAKNGANVDELRLQLQQEYEDTLVNPYIAAERGYVDAVIPPSHTRGYIATALHLLERKIAHLPPKKHGNIPL

SEQ ID NO: 70 - protein, 1158 aa, Thermobifida fusca
MSARLSFREVLGSRVLVADGAMGTMLQTYDLSMDDFEGHEGCNEVLNITRPDVVREIHEAYLQAGVDCVETNTFGANFGNLGEYGIAERTYELAEAGARLAREAADAYTTADHVRYVLGSVGPGTKLPTLGHAPYAVLRDHYEQCARGLIDGGVDAIVIETCQDLLQAKAAIVGARRARKAAGTDTPIIVQVTIETTGTMLVGSEIGAALTSLEPLGVDMIGLNCATGPAEMSEHLRYLSHHSRIPLSCMPNAGLPELGADGAVYPLQPHELTEAHDTFIREFGLALVGGCCGTTPEHLAQVVERVQGRGVPDRKPHVEPAAASIYQSVPFRQDTSYLAIGERTNANGSKAFREAMLAERYDDCVEIARQQIRDGAHMLDLCVDYVGRDGVRDMRELASRLATASTLPLVLDSTEVAVLEAGLEMLGGRAVLNSVNYEDGDGPDSRFAKVAALAVEHGAALMALTIDEQGQARTAERKVEVAERLIRQLTTEYGIRKHDIIVDCLTFTIATGQEESRRDALETIEAIRELKRRHPDVQTTLGVSNVSFGLNPAARIVLNSVFLHECVQAGLDSAIVHASKILPINRIPEEQRQVALDMIYDRRTDDYDPLQRFLQLFEGVDAQAMRASREEELAALPLWERLERRIVDGEAAGMEADLDEALTQRSALDIINTTLLAGMKTVGDLFGSGQMQLPFVLKSAEVMKAAVAYLEPHMEKVDGDLGKGRIVLATVKGDVHDIGKNLVDIILSNNGYEVINLGIKQPISAILEAAERHRADVIGMSGLLVKSTVVMRENLEEMNARGVADRYPVLLGGAALTRSYVEQDLAEIFKGEVRYARDAFEGLKLMDAIMAVKRGVKGAKLPPLRTRRVKRGAQLTVTEPEKMPTRSDVATDNPVPTPPFWGDRICKGIPLADYAAFLDERATFMGQWGLRGSRGDGPTYEELVETEGRPRLRMWLDRIQTEGWLEPAVVYGYYRCYSEGNDLVVLGEDENELTRFTFPRQRRDRHLCLADFFRPKESGELDTVAFQVVTVGSTISKATAELFEKNAYRDYLELHGLSVQLTEALAEYWHTRVRAELGFAGEDPDPADLDAYFKLGYRGARFSLGYGACPNLEDRAKIVALLRPERVGVTLSEEFQLVPEQSTDAIVVHHPEAKYFNV

SEQ ID NO: 71 - protein, 1170 aa, Streptomyces coelicolor
MASSPSTPPADTRTRVSALREALATRVVVADGAMGTMLQAQNPTLDDFQQLEGCNEVLNLTRPDIVRSVHEEYFAAGVDCVETNTFGANHSALGEYDIPERVHELSEAGARVAREVADEFGARDGRQRWVLGSMGPGTKLPTLGHAPYTVLRDAYQRNAEGLVAGGADALLVETTQDLLQTKASVLGARRALDVLGLDLPLIVSVTVETTGTMLLGSEIGAALTALEPLGIDMIGLNCATGPAEMSEHLRYLARHSRIPLTCMPNAGLPVLGKDGAHYPLTAPELADAHETFVREYGLSLVGGCCGTTPEHLRQVVERVRDTAPTARDPRPEPGAASLYQTVPFRQDTSYLAIGERTNANGSKKFREAMLDGRWDDCVEMARDQIREGAHMLDLCVDYVGRDGVADMEELAGRFATASTLPIVLDSTEVDVIRAGLEKLGGRAVINSVNYEDGAGPESRFARVTKLAREHGAALIALTIDEVGQARTAEKKVEIAERLIDDLTGNWGIHESDILVDCLTFTICTGQEESRKDGLATIEGIRELKRRHPDVQTTLGLSNISFGLNPAARILLNSVFLDECVKAGLDSAIVHASKILPIARFDEEQVTTALDLIYDRRREGYDPLQKLMQLFEGATAKSLKASKAEELAALPLEERLKRRIIDGEKNGLEQDLDEALRERPALEIVNDTLLDGMKVVGELFGSGQMQLPFVLQSAEVMKTAVAHLEPHMEKTDDDGKGTIVLATVRGDVHDIGKNLVDIILSNNGYNVVNLGIKQPVSAILEAADEHRADVIGMSGLLVKSTVIMKENLEELNQRKLAADYPVILGGAALTRAYVEQDLHEIYDGEVRYARDAFEGLRLMDALIGIKRGVPGAKLPELKQRRVRAATVEIDERPEEGHVRSDVATDNPVPTPPFRGTRVVKGIQLKEYASWLDEGALFKGQWGLKQARTGEGPSYEELVESEGRPRLRGLLDRLQTDNLLEAAVVYGYFPCVSKDDDLIVLDDDGNERTRFTFPRQRRGRRLCLADFFRPEESGETDVVGFQVVTVGSRIGEETARMFEANAYRDYLELHGLSVQLAEALAEYWHARVRSELGFAGEDPAEMEDMFALKYRGARFSLGYGACPDLEDRAKIAALLEPERIGVHLSEEFQLHPEQSTDAIVIHHPEAKYFNAR

SEQ ID NO: 72 - protein, 1192 aa, Mycobacterium tuberculosis
MTAADKHLYDTDLLDVLSQRVMVGDGAMGTQLQAADLTLDDFRGLEGCNEILNETRPDVLETIHRNYFEAGADAVETNTFGCNLSNLGDYDIADRIRDLSQKGTAIARRVADELGSPDRKRYVLGSMGPGTKLPTLGHTEYAVIRDAYTEAALGMLDGGADAILVETCQDLLQLKAAVLGSRRAMTRAGRHIPVFAHVTVETTGTMLLGSEIGAALTAVEPLGVDMIGLNCATGPAEMSEHLRHLSRHARIPVSVMPNAGLPVLGAKGAEYPLLPDELAEALAGFIAEFGLSLVGGCCGTTPAHIREVAAAVANIKRPERQVSYEPSVSSLYTAIPFAQDASVLVIGERTNANGSKGFREAMIAEDYQKCLDIAKDQTRDGAHLLDLCVDYVGRDGVADMKALASRLATSSTLPIMLDSTETAVLQAGLEHLGGRCAINSVNYEDGDGPESRFAKTMALVAEHGAAVVALTIDEEGQARTAQKKVEIAERLINDITGNWGVDESSILIDTLTFTIATGQEESRRDGIETIEAIRELKKRHPDVQTTLGLSNISFGLNPAARQVLNSVFLHECQEAGLDSAIVHASKILPMNRIPEEQRNVALDLVYDRRREDYDPLQELMRLFEGVSAASSKEDRLAELAGLPLFERLAQRIVDGERNGLDADLDEAMTQKPPLQIINEHLLAGMKTVGELFGSGQMQLPFVLQSAEVMKAAVAYLEPHMERSDDDSGKGRIVLATVKGDVHDIGKNLVDIILSNNGYEVVNIGIKQPIATILEVAEDKSADVVGMSGLLVKSTVVMKENLEEMNTRGVAEKFPVLLGGAALTRSYVENDLAEIYQGEVHYARDAFEGLKLMDTIMSAKRGEAPDENSPEAIKAREKEAERKARHQRSKRIAAQRKAAEEPVEVPERSDVAADIEVPAPPFWGSRIVKGLAVADYTGLLDERALFLGQWGLRGQRGGEGPSYEDLVETEGRPRLRYWLDRLSTDGILAHAAVVYGYFPAVSEGNDIVVLTEPKPDAPVRYRFHFPRQQRGRFLCIADFIRSRELAAERGEVDVLPFQLVTMGQPIADFANELFASNAYRDYLEVHGIGVQLTEALAEYWHRRIREELKFSGDRAMAAEDPEAKEDYFKLGYRGARFAFGYGACPDLEDRAKMMALLEPERIGVTLSEELQLHPEQSTDAFVLHHPEAKYFNV

SEQ ID NO: 73 - protein, 1206 aa, Mycobacterium leprae
MRVTAANQHQYDTDLLETLAQRVMVGDGAMGTQLQDAELTLDDFRGLEGCNEILNETRPDVLETIHRRYFEAGADLVETNTFGCNLSNLGDYDIADKIRDLSQRGTVIARRVADELTTPDHKRYVLGSMGPGTKLPTLGHTEYRVVRDAYTESALGMLDGGADAVLVETCQDLLQLKAAVLGSRRAMTQAGRHIPVFVHVTVETTGTMLLGSEIGAALAAVEPLGVDMIGLNCATGPAEMSEHLRHLSKHARIPVSVMPNAGLPVLGAKGAEYPLQPDELAEALAGFIAEFGLSLVGGCCGTTPDHIREVAAAVARCNDGTVPRGERHVTYEPSVSSLYTAIPFAQKPSVLMIGERTNANGSKVFREAMIAEDYQKCLDIAKDQTRGGAHLLDLCVDYVGRNGVADMKALAGRLATVSTLPIMLDSTEIPVLQAGLEHLGGRCVINSVNYEDGDGPESRFVKTMELVAEHGAAVVALTIDEQGQARTVEKKVEVAERLINDITSNWGVDKSAILIDCLTFTIATGQEESRKDGIETIDAIRELKKRHPAVQTTLGLSNISFGLNPSARQVLNSVFLHECQEAGLDSAIVHASKILPINRIPEEQRQAALDLVYDRRREGYDPLQKLMWLFKGVSSPSSKETREAELAKLPLFDRLAQRIVDGERNGLDVDLDEAMTQKPPLAIINENLLDGMKTVGELFGSGQMQLPFVLQSAEVMKAAVAYLEPHMEKSDCDFGKGLAKGRIVLATVKGDVHDIGKNLVDIILSNNGYEVVNLGIKQPITNILEVAEDKSADVVGMSGLLVKSTVIMKENLEEMNTRGVAEKFPVLLGGAALTRSYVENDLAEVYEGEVHYARDAFEGLKLMDTIMSAKRGEALAPGSPESLAAEADRNKETERKARHERSKRIAVQRKAAEEPVEVPERSDVPSDVEVPAPPFWGSRIIKGLAVADYTGFLDERALFLGQWGLRGVRGGAGPSYEDLVQTEGRPRLRYWLDRLSTYGVLAYAAVVYGYFPAVSEDNDIVVLAEPRPDAEQRYRFTFPRQQRGRFLCIADFIRSRDLATERSEVDVLPFQLVTMGQPIADFVGELFVSNSYRDYLEVHGIGVQLTEALAEYWHRRIREELKFSGNRTMSADDPEAVEDYFKLGYRGARFAFGYGACPDLEDRIKMMELLQPERIGVTISEELQLHPEQSTDAFVLHHPAAKYFNV

SEQ ID NO: 74 - protein, 618 aa, Lactobacillus plantarum
MKFKQALQQRVLVADGAMGTLLYGNYGINSAFENLNLTHPDTILRVHRSYIRAGADIIQTNTYAANRLKLTRYDLQDQVTTINQAAVKIAATAREHADHPVYILGTIGGLAGDTDATVQRATPATIAASVTEQLTALLATNQLDGILLETYYDLPELLAALKIVKAHTDLPVITNVSMLAPGVLRNGTSFTDAIVQLNAAGADVIGTNCRLGPYYLAQSFENLAIPANVKLAVYPNAGLPGTDQDGAVVYDGEPSYFEEYAERFRQLGLNIIGGCCGTTPLHTSATVRGLSNRSIVAHDQPATKPQPPTLVTTKSQHRFLQKVATQKTALVELDPPRDFDTTKFFRGAERLKAAGVDGITLSDNSLATVRIANTTIAAQLKLNYGITPIVHLTTRDHNLIGLQSEIMGLHSLGIEDILAITGDPAKLGDFPGATSVSDVRSVELMKLIKQFNSGIGPTGKSLKEASDFRVAGAFNPNAYRTSISTKSISRKLSYGCDYIITQPVYDLANVDALADALAANHVNVPVFVGVMPLVSRRNAEFLHHEVHGIRIPEPILTRMAEAEQTGNERAVGIAIAKELIDGICARFNGVHIVTPFNRFKTVIELVDYIQQKNLIKVQ

SEQ ID NO: 75 - protein, 759 aa, Mycobacterium tuberculosis
MTQPVRRQPFTATITGSPRIGPRRELKRATEGYWAGRTSRSELEAVAATLRRDTWSALAAAGLDSVPVNTFSYYDQMLDTAVLLGALPPRVSPVSDGLDRYFAAARGTDQIAPLEMTKWFDTNYHYLVPEIGPSTTFTLHPGKVLAELKEALGQGIPARPVIIGPITFLLLSKAVDGAGAPIERLEELVPVYSELLSLLADGGAQWVQFDEPALVTDLSPDAPALAEAVYTALCSVSNRPAIYVATYFGDPGAALPALARTPVEAIGVDLVAGADTSVAGVPELAGKTLVAGVVDGRNVWRTDLEAALGTLATLLGSAATVAVSTSCSTLHVPYSLEPETDLDDALRSWLAFGAEKVREVVVLARALRDGHDAVADEIASSRAAIASRKRDPRLHNGQIRARIEAIVASGAHRGNAAQRRASQDARLHLPPLPTTTIGSYPQTSAIRVARAALRAGEIDEAEYVRRMRQEITEVIALQERLGLDVLVHGEPERNDMVQYFAEQLAGFFATQNGWVQSYGSRCVRPPILYGDVSRPRAMTVEWITYAQSLTDKPVKGMLTGPVTILAWSFVRDDQPLADTANQVALAIRDETVDLQSAGIAVIQVDEPALRELLPLRRADQAEYLRWAVGAFRLATSGVSDATQIHTHLCYSEFGEVIGAIADLDADVTSIEAARSHMEVLDDLNAIGFANGVGPGVYDIHSPRVPSAEEMADSLRAALRAVPAERLWVNPDCGLKTRNVDEVTASLHNMVAAAREVRAG

SEQ ID NO: 76 - protein, 760 aa, Mycobacterium leprae
MDELVTTQSFTATVTGSPRIGPRRELKRATEGYWAKRTSRSELESVASTLRRDMWSDLAAAGLDSVPVNTFSYYDQMLDTAFMLGALPARVAQVSDDLDQYFALARGNNDIKPLEMTKWFDTNYHYLVPEIEPATTFSLNPGKILGELKEALEQRIPSRPVIIGPVTFLLLSKGINGGGAPIQRLEELVGIYCTLLSLLAENGARWVQFDEPALVTDLSPDAPALAEAVYTALGSVSKRPAIYVATYFGNPGASLAGLARTPIEAIGVDFVCGADTSVAAVPELAGKTLVAGIVDGRNIWRTDLESALSKLATLLGSAATVAVSTSCSTLHVPYSLEPETDLDDNLRSWLAFGAEKVAEVVVLARALRDGRDAVADEIAASNAAVASRRSDPRLHNGQVRARIDSIVASGTHRGDAAQRRTSQDARLHLPPLPTTTIGSYPQTSAIRKARAALQDAEIDEAEYISRMKKEVADAIKLQEQLGLDVLVHGEPERNDMVQYFAEQLGGFFATQNGWVQSYGSRCVRPPILYGDVSRPHPMTIEWITYAQSLTDKPVKGMLTGPVTILAWSFVRDDQPLADTANQVALAIRDETVDLQSAGIAIIQVDEPALRELLPLRRADQDEYLCWAVKAFRLATSGVADSTQIHTHLCYSEFGEVIGAIADLDADVTSIEAARSHMEVLDDLNAVGFANSIGPGVYDIHSPRVPSTDEIAKSLRAALKAIPMQRLWVNPDCGLKTRSVDEVSASLQNMVAAARQVRAGA

SEQ ID NO: 77 - protein, 772 aa, Streptomyces coelicolor
MTAKSAAAAARATVYGYPRQGPNRELKKAIEGYWKGRVSAPELRSLAADLRAANWRRLADAGIDEVPAGDFSYYDHVLDTTVMVGAIPERHRAAVAADALDGYFAMARGTQEVAPLEMTKWFDTNYHYLVPELGPDTVFTADSTKQVTELAEAVALGLTARPVLVGPVTYLLLAKPAPGAPADFEPLTLLDRLLPVYAEVLTDLRAAGAEWVQLDEPAFVQDRTPAELNALERAYRELGALTDRPKLLVASYFDRLGDALPVLAKAPIEGLALDFTDAAATNLDALAAVGGLPGKRLVAGVVNGRNIWINDLQKSLSTLGTLLGLADRVDVSASCSLLHVPLDTGAERDIEPQILRWLAFARQKTAEIVTLAKGLAQGTDAITGELAASRADMASRAGSPITRNPAVRARAEAVTDDDARRSQPYAERTAAQRAHLGLPPLPTTTIGSFPQTGEIRAARADLRDGRIDIAGYEERIRAEIQEVISFQEKTGLDVLVHGEPERNDMVQYFAEQLTGYLATQHGWVQSYGTRYVRPPILAGDISRPEPMTVRWTTYAQSLTEKPVKGMLTGPVTMLAWSFVRDDQPLGDTARQVALALRDEVNDLEAAGTSVIQVDEPALRETLPLRAADHTAYLAWATEAFRLTTSGVRPDTQIHTHMCYAEFGDIVQAIDDLDADVISLEAARSHMQVAHELATHGYPREAGPGVYDIHSPRVPSAEEAAALLRTGLKAIPAERLWVNPDCGLKTRGWPETRASLENLVATARTLRGELSAS

SEQ ID NO: 78 - protein, 420 aa, Streptomyces coelicolor
MSLLNTPLHELDPDVAAAVDAELDRQQSTLEMIASENFAPVAVMEAQGSVLTNKYAEGYPGRRYYGGCEHVDVVEQIAIDRVKALFGAEHANVQPHSGAQANAAAMFALLKPGDTIMGLNLAHGGHLTHGMKINFSGKLYNVVPYHVGDDGQVDMAEVERLAKETKPKLIVAGWSAYPRQLDFAAFRKVADEVGAYLMVDMAHFAGLVAAGLHPNPVPHAHVVTTTTHKTLGGPRGGVILSTAELAKKINSAVFPGQQGGPLEHVVAAKAVAFKVAASEDFKERQGRTLEGARILAERLVRDDAKAAGVSVLTGGTDVHLVLVDLRDSELDGQQAEDRLHEVGITVNRNAVPNDPRPPMVTSGLRIGTPALATRGFTAEDFAEVADVIAEALKPSYDAEALKARVKTLADKHPLYPGLNK

SEQ ID NO: 79 - protein, 429 aa, Thermobifida fusca
MKVRKLMTAQSTSLTQSLAQLDPEVAAAVDAELARQRDTLEMIASENFAPRAVLEAQGTVLTNKYAEGYPGRRYYGGCEHVDVIEQLAIDRAKALFGAEHANVQPHSGAQANTAVYFALLQPGDTILGLDLAHGGHLTHGMRINYSGKILNAVAYHVRESDGLIDYDEVEALAKEHQPKLIIAGWSAYPRQLDFARFREIADQTGALLMVDMAHFAGLVAAGLHPNPVPYADVVTTTTHKTLGGPRGGLILAKEELGKKINSAVFPGMQGGPLQHVIAAKAVALKVAASEEFAERQRRTLSGAKILAERLTQPDAAEAGIRVLTGGTDVHLVLVDLVNSELNGKEAEDRLHEIGITVNRNAVPNDPRPPMVTSGLRIGTPALATRGFGDADFAEVADIIAEALKPGFDAATLRSRVQALAAKHPLYPGL

SEQ ID NO: 80 - protein, 426 aa, Mycobacterium tuberculosis
MSAPLAEVDPDIAELLAKELGRQRDTLEMIASENFAPRAVLQAQGSVLTNKYAEGLPGRRYYGGCEHVDVVENLARDRAKALFGAEFANVQPHSGAQANAAVLHALMSPGERLLGLDLANGGHLTHGMRLNFSGKLYENGFYGVDPATHLIDMDAVRATALEFRPKVIIAGWSAYPRVLDFAAFRSIADEVGAKLLVDMAHFAGLVAAGLHPSPVPHADVVSTTVHKTLGGGRSGLIVGKQQYAKAINSAVFPGQQGGPLMHVIAGKAVALKIAATPEFADRQRRTLSGARIIADRLMAPDVAKAGVSVVSGGTDVHLVLVDLRDSPLDGQAAEDLLHEVGITVNRNAVPNDPRPPMVTSGLRIGTPALATRGFGDTEFTEVADIIATALATGSSVDVSALKDRATRLARAFPLYDGLEEWSLVGR

SEQ ID NO: 81 - protein, 426 aa, Mycobacterium leprae
MVAPLAEVDPDIAELLGKELGRQRDTLEMIASENFVPRSVLQAQGSVLTNKYAEGLPGRRYYDGCEHVDVVENIARDRAKALFGADFANVQPHSGAQANAAVLHALMSPGERLLGLDLANGGHLTHGMRLNFSGKLYETGFYGVDATTHLIDMDAVRAKALEFRPKVLIAGWSAYPRILDFAAFRSIADEVGAKLWVDMAHFAGLVAVGLHPSPVPHADVVSTTVHKTLGGGRSGLILGKQEFATAINSAVFPGQQGGPLMHVIAGKAVALKIATTPEFTDRQQRTLAGARILADRLTAADVTKAGVSVVSGGTDVHLVLVDLRNSPFDGQAAEDLLHEVGITVNRNVVPNDPRPPMVTSGLRIGTPALATRGFGEAEFTEVADIIATVLTTGGSVDVAALRQQVTRLARDFPLYGGLEDWSLAGR

SEQ ID NO: 82 - protein, 412 aa, Lactobacillus plantarum
MNYQEQDPEVWAAISKEQARQQHNIELIASENIVSKGVRAAQGSVLTNKYSEGYPGHRFYGGNEYIDQVETLAIERAKKLFGAEYANVQPHSGSQANAAAYMALIQPGDRVMGMSLDAGGHLTHGSSVNFSGKLYDFQGYGLDPETAELNYDAILAQAQDFQPKLIVAGASAYSRLIDFKKFREIADQVGALLMVDMAHIAGLVAAGLHPNPVPYADVVTTTTHKTLRGPRGGMILAKEKYGKKINSAVFPGNQGGPLDHVIAGKAIALGEDLQPEFKVYAQHIIDNAKAMAKVFNDSDLVRVISGGTDNHLMTIDVTKSGLNGRQVQDLLDTVYITVNKEAIPNETLGAFKTSGIRLGTPAITTRGFDEADATKVAELILQALQAPTDQANLDDVKQQAMALTAKHPIDVD

SEQ ID NO: 83 - protein, 388 aa, Thermobifida fusca
MASRAASTGSHSAPISSSSGRRLATKAASSASTRGRTKATGDKCEELIRAGYRLFRRPSSPRHTQTPPIWSITVGDMLGSPTPRPAPRPRRISELLARKEPTFSFEFFPPKTPEGERMLWRAIREIEALRPSFVSVTYGAGGSTRDRTVNVTEKIATNTTLLPVAHITAVNHSVRELRHLIGRFAAAGVCNMLALRGDPPGDPLGEWVKHPEGLTHAEELVRLIKESGDFCVGVAAFPYKHPRSPDVETDTDFFVRKCRAGADYAITQMFFEAEDYLRLRDRVAARGCDVPIIPEIMPVTKFSTIARSEQLSGAPFPRRLAEEFERVADDPEAVRALGIEHATRLCERLLAEGAPGIHFITFNRSTATREVYHRLVGATQPAAVAALP

SEQ ID NO: 84 - protein, 307 aa, Streptomyces coelicolor
MALGTASTRTDRARTVRDILATGKTTYSFEFSAPKTPKGERNLWSALRRVEAVAPDFVSVTYGAGGSTRAGTVRETQQIVADTTLTPVAHLTAVDHSVAELRNIIGQYADAGIRNMLAVRGDPPGDPNADWIAHPEGLTYAAELVRLIKESGDFCVGVAAFPEMHPRSADWDTDVTNFVDKCRAGADYAITQMFFQPDSYLRLRDRVAAAGCATPVIPEVMPVTSVKMLERLPKLSNASFPAELKERILTAKDDPAAVRSIGIEFATEFCARLLAEGVPGLHFITLNNSTATLEIYENLGLHHPPRA

SEQ ID NO: 85 - protein, 229 aa, Mycobacterium tuberculosis
MLTAMRGDIRAARERDPAAPTALEVIFCYPGVHAVWGHRLAHWLWQRGARLLARAAAEFTRILTGVDIHPGAVIGARVFIDHATGVVIGETAEVGDDVTIYHGVTLGGSGMVGGKRHPTVGDRVIIGAGAKVLGPIKIGEDSRIGANAVVVKPVPPSAVVVGVPGQVIGQSQPSPGGPFDWRLPDLVGASLDSLLTRVARLDALGGGPQAAGVIRPPEAGIWHGEDFSI

SEQ ID NO: 86 - protein, 227 aa, Mycobacterium leprae
MFAAIRRDIQAARQRDPAQPTVLEVICCYPGVHAVWGHRISHWLWNRRARLAARAFAELTRILTGVDIHPGAVLGAGLFIDHATGVVIGETAEVGDDVTIFHGVTLGGTGRETGKRHPTIGDRVTIGAGAKVLGAIKIGEDSRIGANAVVVKEVPASAVAVGVPGQIISSDSPANGDDSVLPDFVGVSLQSLLTRVAKLEAEDGGSQTYRVIRLPEAGVWHGEDFSI

SEQ ID NO: 87 - protein, 180 aa, Lactobacillus plantarum
MFQTARAILNRDPAAINLRTVMLTYPGIHALAWYRVAHYFETHRLPLLAALLSQHAARHTGILIHPAAQIGHRVFFDHGIGTVIGATAVIEDDVTILHGVTLGARKTEQAGRRHPYVCRGAFIGAHAQLLGPITIGANSKIGAGAIVLDSVPAHVTAVGNPAHLVATQLHAYHEATSNQA

SEQ ID NO: 88 - protein, 528 aa, Mycobacterium tuberculosis
MSLPVVLIADKLAPSTVAALGDQVEVRWVDGPDRDKLLAAVPEADALLVRSATTVDAEVLAAAPKLKIVARAGVGLDNVDVDAATARGVLVVNAPTSNIHSAAEHALALLLAASRQIPAADASLREHTWKRSSFSGTEIFGKTVGVVGLGRIGQLVAQRIAAFGAYVVAYDPYVSPARAAQLGIELLSLDDLLARADFISVHLPKTPETAGLIDKEALAKTKPGVIIVNAARGGLVDEAALADAITGGHVRAAGLDVFATEPCTDSPLFELAQVVVTPHLGASTAEAQDRAGTDVAESVRLALAGEFVPDAVNVGGGVVNEEVAPWLDLVRKLGVLAGVLSDELPVSLSVQVRGELAAEEVEVLRLSALRGLFSAVIEDAVTFVNAPALAAERGVTAEICKASESPNHRSVVDVRAVGADGSVVTVSGTLYGPQLSQKIVQINGRHFDLRAQGINLIIHYVDRPGALGKIGTLLGTAGVNIQAAQLSEDAEGPGATILLRLDQDVPDDVRTAIAAAVDAYKLEVVDLS

SEQ ID NO: 89 - protein, 528 aa, Mycobacterium leprae
MDLPVVLIADKLAQSTVAALGDQVEVRWVDGPDRTKLLAAVPEADALLVRSATTVDAEVLAAAPKLKIVARAGVGLDNVDVDAATARGVLVVNAPTSNIHSAAEHALALLLAASRQIAEADASLRAHIWKRSSFSGTEIFGKTVGVVGLGRIGQLVAARIAAFGAHVIAYDPYVAPARAAQLGIELMSFDDLLARADFISVHLPKTPETAGLIDKEALAKTKPGVIIVNAARGGLVDEVALADAVRSGHVRAAGLDVFATEPCTDSPLFELSQVVVTPHLGASTAEAQDRAGTDVAESVRLALAGEFVPDAVNVDGGVVNEEVAPWLDLVCKLGVLVAALSDELPASLSVHVRGELASEDVEILRLSALRGLFSTVIEDAVTFVNAPALAAERGVSAEITTGSESPNHRSVVDVRAVASDGSVVNIAGTLSGPQLVQKIVQVNGRNFDLRAQGMNLVIRYVDQPGALGKIGTLLGAAGVNIQAAQLSEDTEGPGATILLRLDQDVPGDVRSAIVAAVSANKLEVVNLS

SEQ ID NO: 90 - protein, 545 aa, Thermobifida fusca
MAATAVEPTRTPSKEFVVPKPVVLVAEELSPAGIALLEEDFEVRHVNGADRSQLLPALAGVDALIVRSATKVDAEVLAAAPSLKVVARAGVGLDNVDVEAATKAGVLVVNAPTSNIISAAEQAINLLLATARNTAAAHAALVRGEWKRSKYTGVELYDKTVGIVGLGRIGVLVAQRLQAFGTKLIAYDPFVQPARAAQLGVELVELDELLERSDFITIHLPKTKDTIGLIGEEELRKVKPTVRIINAARGGIVDETALYHALKEGRVAGAGLDVFAKEPCTDSPLFELENVVVAPHLGASTHEAQEKAGTQVARSVKLALAGEFVPDAVNIQGKGVAEDIKPGLPLTEKLGRILAALADGAITRVEVEVRGEIVAHDVKVIELAALKGLFTDIVEEAVTYVNAPLVAKERGIEVSLTTEEESPDWRNVITVRAILSDGQRVSVSGTLTGPRQLEKLVEVNGYTMEIAPSEHMAFFSYHDRPGVVGVVGQLLGQAQVNIAGMQVSRDKEGGAALIALTVDSAIPDETLETISKEIGAEISRVDLVD

SEQ ID NO: 91 - protein, 529 aa, Streptomyces coelicolor
MSSKPVVLIAEELSPATVDALGPDFEIRHCNGADRAELLPAIADVDAILVRSATKVDAEAVAAAKKLKVVARAGVGLDNVDVSAATKAGVMVVNAPTSNIVTAAELACGLIVATARNIPQANAALKNGEWKRSKYTGVELAEKTLGVVGLGRIGALVAQRMSAFGMKVVAYDPYVQPARAAQMGVKVLSLDELLEVSDFITVHLPKTPETLGLIGDEALRKVKPSVRIVNAARGGIVDEEALYSALKEGRVAGAGLDVYAKEPCTDSPLFEFDQVVATPHLGASTDEAQEKAGIAVAKSVRLALAGELVPDAVNVQGGVIAEDVKPGLPLAERLGRIFTALAGEVAVRLDVEVYGEITQHDVKVLELSALKGVFEDVVDETVSYVNAPLFAQERGVEVRLTTSSESPEHRNVVIVRGTLSDGEEVSVSGTLAGPKHLQKIVAIGEYDVDLALADHMVVLRYEDRPGVVGTVGRIIGEAGLNIAGMQVARATVGGEALAVLTVDDTVPSGVLAEVAAEIGATSARSVNLV

SEQ ID NO: 92 - protein, 324 aa, Lactobacillus plantarum
MTKVFIAGQLPAQANTLLLQSQLVIDTYTGDNLISHAELIRRVADADFLIIPLSTQVDQDVLDHAPHLKLIANFGAGTNNIDIAAAAKRQIPVTNTPNVSAVATAESTVGLIISLAHRIVEGDHLMRTSGFNGWAPLFFLGHNLQGKTLGILGLGQIGQAVAKRLHAFDMPILYSQHHRLPISRETQLGATFVSQDELLQRADIVTLHLPLTTQTTHLIDNAAFSKMKSTALLINAARGPIVDEQALVTALQQHQIAGAALDVYEHEPQVTPGLATMNNVILTPHLGNATVEARDGMATIVAENVIAMAQHQPIKYVVNDVTPA

SEQ ID NO: 93 - protein, 199 aa, Mycobacterium tuberculosis
MNSPLVVGFLACFTLIAAIGAQNAFVLRQGIQREHVLPVVALCTVSDIVLIAAGIAGFGALIGAHPRALNVVKFGGAAFLIGYGLLAARRAWRPVALIPSGATPVRLAEVLVTCAAFTFLNPHVYLDTVVLLGALANEHSDQRWLFGLGAVTASAVWFATLGFGAGRLRGLFTNPGSWRILDGLIAVMMVALGISLTVT

SEQ ID NO: 94 - protein, 201 aa, Mycobacterium tuberculosis
MMTLKVAIGPQNAFVLRQGIRREYVLVIVALCGIADGALIAAGVGGFAALIHAHPNMTLVARFGGAAFLIGYALLAARNAWRPSGLVPSESGPAALIGVVQMCLVVTFLNPHVYLDTVVLIGALANEESDLRWFFGAGAWAASVVWFAVLGFSAGRLQPFFATPAAWRILDALVAVTMIGVAVVVLVTSPSVPTANVALII

SEQ ID NO: 95 - protein, 204 aa, Streptomyces coelicolor
MNNALTAAAAGFGTGLSLIVAIGAQNAFVLRQGVRRDAVLAVVGICALSDAVLIALGVGGVGAVVVAWPGALTAVGWIGGAFLLCYGALAARRVFRPSGALRADGAAAGSRRRAVLTCLALTWLNPHVYLDTVFLLGSVAADRGPLRWTFGLGAAAASLVWFAALGFGARYLGRFLSRPVAWRVLDGLVAATMIVLGVSLVAGA

SEQ ID NO: 96 - protein, 202 aa, Lactobacillus plantarum
MQVFLQGLLFGIVYIAPIGMQNLFVVSTAIEQPLQRALRVALIVIAFDTSLSLACFYGVGRLLQTTPWLELGVLLIGSLLVFYIGWNLLRKKATAMGTLDADFSYKAAILTAFSVAWLNPQALIDGSVLLAAFRVSIPAALTHFFMLGVILASIIWFIGLTSLISKFKHLMQPRVLLWINRICGGIIILYGVQLLATFITKI

SEQ ID NO: 97 - protein, 388 aa, Mycobacterium tuberculosis
MSEDRTGHQGISGPATRAIHAGYRPDPATGAVNVPIYASSTFAQDGVGGLRGGFEYARTGNPTRAALEASLAAVEEGAFARAFSSGMAATDCALRAMLRPGDHVVIPDDAYGGTFRLIDKVFTRWDVQYTPVRLADLDAVGAAITPRTRLIWVETPTNPLLSIADITAIAELGTDRSAKVLVDNTFASPALQQPLRLGADVVLHSTTKYIGGHSDVVGGALVTNDEELDEEFAFLQNGAGAVPGPFDAYLTMRGLKTLVLRMQRHSENACAVAEFLADHPSVSSVLYPGLPSHPGHEIAARQMRGFGGMVSVRMRAGRRAAQDLCAKTRVFILAESLGGVESLIEHPSAMTHASTAGSQLEVPDDLVRLSVGIEDIADLLGDLEQALG

SEQ ID NO: 98 - protein, 388 aa, Mycobacterium leprae
MSEDYRGHHGITGLATKAIHAGYRPDPATGAVNVPIYASSTFAQDGVGELRGGFEYARTGNPMRAALEASLATVEEGVFARAFSSGMAASDCALRVMLRPGDHVIIPDDVYGGTFRLIDKVFTQWNVDYTPVPLSDLDAVRAAITSRTRLIWVETPTNPLLSIADITSIGELGKKHSVKVLVDNTFASPALQQPLMLGADVVLHSTTKYIGGHSDVVGGALVTNDEELDQAFGFLQNGAGAVPSPFDAYLTMRGLKTLVLRMQRHNENAITVAEFLAGHPSVSAVLYPGLPSHPGHEVAARQMRGFGGMVSLRMRAGRLAAQDLCARTKVFTLAESLGGVESLIEQPSAMTHASTTGSQLEVPDDLVRLSVGIEDVGDLLCDLKQALN

SEQ ID NO: 99 - protein, 386 aa, Streptomyces coelicolor
MPMSDRHISQHFETLAIHAGNTADPLTGAVVPPIYQVSTYKQDGVGGLRGGYEYSRSANPTRTALEENLAALEGGRRGLAFASGLAAEDCLLRTLLRPGDHVVIPNDAYGGTFRLFAKVATRWGVEWSVADTSDAAAVRAALTPKTKAVWVETPSNPLLGITDIAQVAQVARDAGARLVVDNTFATPYLQQPLALGADVVVHSLTKYMGGHSDVVGGALIVGDQELGEELAFHQNAMGAVAGPFDSWLVLRGTKTLAVRMDRHSENATKVADMLSRHARVTSVLYPGLPEHPGHEVAAKQMKAFGGMVSFRVEGGEQAAVEVCNRAKVFTLGESLGGVESLIEHPGRMTHASAAGSALEVPADLVRLSVGIENADDLLADLQQALG

SEQ ID NO: 100 - protein, 381 aa, Thermobifida fusca
MSYEGFETLAIHAGQEADAETGAVVVPIYQTSTYRQDGVGGLRGGYEYSRTANPTRTALEECLAALEGGVRGLAFASGMAAEDTLLRTIARPGDHLIIPNDAYGGTFRLVSKVFERWGVSWDAVDLSNPEAVRTAIRPETVAIWVETPTNPLLNIADIAALADIAHAADALLVVDNTFASPYLQRPLSLGADVVVHSTTKYLGGHSDVVGGALVVADAELGERLAFHQNSMGAVAGPFDAWLTLRGIKTLGVRMDRHCANAERVVEALVGHPEVAEVLYPGLSDHPGHKVAVDQMRAFGGMVSFRMRGGEEAALRVCAKTKVFTLAESLGGVESLIEHPGKMTHASTAGSLLEVPSDLVRLSVGIETVDDLVNDLLQALEP

SEQ ID NO: 101 - protein, 381 aa, Lactobacillus plantarum
MKFETQLIHGGISEDATTGATSVPIYMASTFRQTKIGQNQYEYSRTGNPTRAAVEALIATLEHGSAGFAFASGSAAINTVFSLFSAGDHIIVGNDVYGGTFRLIDAVLKHFGMTFTAVDTRDLAAVEAAITPTTKAIYLETPTNPLLHITDIAAIAKLAQAHDLLSIIDNTFASPYVQKPLDLGVDIVLHSASKYLGGHSDVIGGLVVTKTPALGEKIGYLQNAIGSILAPQESWLLQRGMKTLALRMQAHLNNAAKIFTYLKSHPAVTKIYYPGDPDNPDFSIAKQQMNGFGAMISFELQPGMNPQTFVEHLQVITLAESLGALESLIEIPALMTHGAIPRTIRLQNGIKDELIRLSVGVEASDDLLADLERGFASIQAD

SEQ ID NO: 102 - protein, 211 aa, Streptomyces coelicolor
MAGIGAFWSVSFLLVLVPGADWAYAITAGLRHRSVLPAVGGMLSGYVLLTAVVAAGLATAVAGSPTVLTALTAAGAAYLIWLGATTLARPAAPRAEEGDQGDGSGSLVGRAARGAGISGLNPKALLLFLALLPQFAARDADWPFAAQIVALGLVHTANCAVVYTGVGATARRILGARPAVATAVSRFSGAAMILVGALLLVERLLAQGPTH

SEQ ID NO: 103 - protein, 578 aa, Streptomyces coelicolor
MSVPGSVAQVTEAEEPKPQSDEARSAFRQPSGIAASIDGESSTTSEFEIPQGFAVPRHAGTESETTSEFSLPDGLEVPQAPPADTEGSAFTMPSTHSAWTAPTAFTPASGFPAVSLTDVPWQDRMRAMLRMPVAERPAPEPSQKHDDETGPAVPRVLDLTLRIGELLLAGGEGAEDVEAAMFAVCRSYGLDRCEPNVTFTLLSISYQPSLVEDPVTASRTVRRRGTDYTRLAAVFHLVDDLSDPDTNISLEEAYRRLAEIRRNRHPYPTWVLTVASGLLAGGASLLVGGGLTVFFAAMFGSMLGDRLAWLCAGRGLPEFYQFAVAAMPPAAMGVVLTVTHVDVKASAVITGGLFALLPGRALVAGVQDGLTGFYITAAARLLEVMYFFVSIVAGVLVVLYFGVQLGAELNPDAKLGTGDEPFVQIFASMLLSLAFAILLQQERATVLAVTLNGGIAWCVYGAMNYAGDISPVASTAAAAGLVGLFGQLMSRYRFASALPYTTAAIGPLLPGSATYFGLLGIAQGEVDSGLLSLSNAVALAMAIAIGVNLGGEISRLFLKVPGAASAAGRRAAKRTRGF

SEQ ID NO: 104 - protein, 529 aa, Mycobacterium tuberculosis
MDQDRSDNTALRRGLRIALRGRRDPLPVAGRRSRTSGGIGDLHTRKVLDLTIRLAEVMLSSGSGTADVVATAQDVAQAYQLTDCVVDITVTTIIVSALATTDTPPVTIMRSVRTRSTDYSRLAELDRLVQRITSGGVAVDQAHEAMDELTERPHPYPRWLATAGAAGFALGVAMLLGGTWLTCVLAAVTSGVIDRLGRLLNRIGTPLFFQRVFGAGIATLVAVAAYLIAGQDPTALVATGIVVLLSGMTLVGSMQDAVTGYMLTALARLGDALFLTAGIVVGILISLRGVTNAGIQIELHVDATTTLATPGMPLPILVAVSGAALSGVCLTIASYAPLRSVATAGLSAGLAELVLIGLGAAGFGRVVATWTAAIGVGFLATLISIRRQAPALVTATAGIMPMLPGLAVFRAVFAFAVNDTPDGGLTQLLEAAATALALGSGVVLGEFLASPLRYGAGRIGDLFRIEGPPGLRRAVGRVVRLQPAKSQQPTGTGGQRWRSVALEPTTADDVDAGYRGDWPATCTSATEVR

SEQ ID NO: 105 - protein, 529 aa, Mycobacterium tuberculosis
MDQDRSDNTALRRGLRIALRGRRDPLPVAGRRSRTSGGIDDLHTRKVLDLTIRLAEVMLSSGSGTADVVATAQDVAQAYQLTDCVVDITVTTIIVSALATTDTPPVTIMRSVRTRSTDYSRLAELDRLVQRITSGGVAVDQAHEAMDELTERPHPYPRWLATAGAAGFALGVAMLLGGTWLTCVLAAVTSGVIDRLGRLLNRIGTPLFFQRVFGAGIATLVAVAAYLIAGQDPTALVATGIVVLLSGMTLVGSMQDAVTGYMLTALARLGDALFLTAGIVVGILISLRGVTNAGIQIELHVDATTTLATPGMPLPILVAVSGAALSGVCLTIASYAPLRSVATAGLSAGLAELVLIGLGAAGFGRVVATWTAAIGVGFLATLISIRRQAPALVTATAGIMPMLPGLAVFRAVFAFAVNDTPDGGLTQLLEAAATALALGSGVVLGEFLASPLRYGAGRIGDLFRIEGPPGLRRAVGRVVRLQPAKSQQPTGTGGQRWRSVALEPTTADDVDAGYRGDWPATCTSATEVR

SEQ ID NO: 106 - protein, 542 aa, Thermobifida fusca
MISYGPVADRCRVGATSAAWGTSPPMSFPFLPLVSHPLPYVPGLDASFPDGACVPLGRGPSRGGERRMNQAPRRSDTSHSPTLLTRLRDWRASRGVLDLEAEEFEDEAPRPDPRAMDLVLRVGELLLASGEATETVSDAMLSLAVAFELPRSEVSVTFTGITLSCHPGGDEPPVTGERVVRRRSLDYHKVNELHALVEDAALGLLDVERATARLHAIKRSRPHYPRWVIVAGLGLIASSASVMVGGGIIVAATAFAATVLGDRAAGWLARRGVAEFYQMAVAALLAASTGMALLWVSEELELGLRANAVITGSIVALLPGRPLVSSLQDGISGAYVSAAARLLEVFFMLGAIVAGVGAVAYTAVRLGLYVDLDNLPSAGTSLEPVVLAAAAGLALAFAVSLVAPVRALLPIGAMGVLIWVCYAGLRELLAVPPVVGTGAGAVVVGVIGHWLARRTRRPPLTFIIPSIAPLLPGSILYRGLIEMSTGEPLAGVASLGEAVAVGLALGAGVNLGGELVRAFSWGGLVGAGRRGRQAARRTRGGY

SEQ ID NO: 107 - protein, 447 aa, Lactobacillus plantarum
MNKERKSVMPLSQRHHMTIPWKDFIRNEDVPAKHASLQERTSIVGRVGILMLSCGTGAWRVRDAMNKIARSLNLTCSADIGLISIQYTCFHHERSYTQVLSIPNTGVNTDKLNILEQFVKDFDAKYARLTVAQVHAAIDEVQTRPKQYSPLVLGLAAGLACSGFIFLLGGGIPEMICSFLGAGLGNYVRALMGKRSMTTVAGIAVSVAVACLAYMVSFKIFEYNFQILAQHEAGYIGAMLFVIPGFPFITSMLDISKLDMRSGLERLAYAIMVTLIATLVGWLVATLVSFKPADFLPLGLSPLAVLLLRLPASFCGVYGFSIMFNSSQKMAITAGFIGAIANTLRLELVDLTAMPPAAAAFCGALVAGLIASVVNRYNGYPRISLTVPSIVIMVPGLYIYRAIYSIGNNQIGVGSLWLTKAVLIIMFLPLGLFVARALLDHEWRHFD

SEQ ID NO: 108 - protein, 329 aa, Thermobifida fusca
MSGGVMADITRNRSSGLAFAIASALAFGGSGPVARPLIDAGLDPLHVTWLRVAGAALLLLPVAFRHHRTLRTRPALLLAYGVFPMAGVQAFYFAAISRIPVGVALLIEFLGPVLVLLWTRLVRRIPVSRAASLGVALAVIGLGCLVEVWAGIRLDAVGLILALAAAVCQATYFLLSDTARDDVDPLAVISYGALIATALLSLLARPWTLPWGILAQNVGFGGLDIPALILLVWLALVATTIAYLTGVAAVRRLSPVVAGGVAYLEVVTSIVLAWLLLGEALSVAQLVGAAAVVTGAFLAQTAVPDTSAAQGPETLPTAQDPAPQTGSAR

SEQ ID NO: 109 - protein, 300 aa, Thermobifida fusca
MNSDSPGQSAPGPFSRAAALVRAAGTAIPATWLVGVSILSVQFGAGVAKNLFAVLPPSTVVWLRLLASALVLLCFAPPPLRGHSRTDWLVAVGFGTSLAVMNYAIYESFARIPLGVAVTIEFLGPLAVAVAGSRRWRDLVWVVLAGTGVALLGWDDGGVTLAGVAFAALAGAAWACYILLSAATGRRFPGTSGLTVASVIGAVLVAPMGLAHSSPALLDPSVLLTGLAVGLLSSVIPYSLEMQALRRIPPGVFGILMSLEPAAAALVGLVLLGEFLTVAQWAAVACVVVASVGATRSARL

SEQ ID NO: 110 - protein, 360 aa, Thermobifida fusca
MWTLDLPLKRNDSSTNGAWTETENRRHSGGMILSFVSLVRHAHLRVPAPLLTVLSLVLLHMGSAGAVHLFAIAGPLEVTWLRLSWAALLLFAVGGRPLLRAARAATWSDLAATAALGVVSAGMTLLFSLALDRIPLGTAAAIEFLGPLTVSVLALRRRRDLLWIVLAVAGVLLLTRPWHGEADLLGIAFGLGGAVCVALYIVFSQTVGSRLGVLPGLTLAMTVSALVTAPLGLPGAMAAADRHLVAATLGLALIYPLLPLLLEMVSLQRMNRGTFGILVSVDPAIGLLIGLLLIGQVPVPLQVAGMALVVAAGLGATRGTSGRTRGGADPHATDGEPEDRTPDRPAPDDAGHHTTDPVTV

SEQ ID NO: 111 - protein, 320 aa, Streptomyces coelicolor
MAATRPAVIALTALAPVSWGSTYAVTTEFLPPDRPLFTGLMRALPAGLLLLALARVLPRGAWWGKAAVLGVLNIGAFFPLLFLAAYRMPGGMAAVVGSVGPLLVVGLSALLLGQRPTTRSVLTGVAAASGVSLVVLEAAGALDPLGVLAALAATASMSTGTVLAGRWGRPEGVGPLALTGWQLTAGGLLLAPLALLVEGAPPALDGPAVGGYLYLALANTALAYWLWFRGIGRLSATQVTFLGPLSPLTAAVIGWAALGEALGPVQLAGTALAFGATLVGQTVPSAPRTPPVAAGAGPFSSASRNGRKDSMDLTGAALRR

SEQ ID NO: 112 - protein, 295 aa, Streptomyces coelicolor
MPDGAPGGRFGALGPVGLVLAGGISVQFGAALAVSLMPRAGALGVVTLRLAVAAVVMLLVCRPRLRGHSRADWGTVVVFGIAMAGMNGLFYQAVDRIPLGPAVTLEVLGPLALSVFASRRAMNLVWAALALAGVFLLGGGGFDGLDPAGAAFALAAGAMWAAYIVFSARTGRRFPQADGLALAMAVGALLFLPLGIVESGSKLIDPVTLTLGAGVALLSSVLPYTLELLALRRLPAPTFAILMSLEPAIAAAAGFLILDQALTATQSAAIALVIAASMGAVRTQVGRRRAKALPE

SEQ ID NO: 113 - protein, 324 aa, Streptomyces coelicolor
MMTTARTSPPAPWHRRPDLLAAGAATVTVVLWASAFVSIRSAGEAYSPGALALGRLLSGVLTLGAIWLLRREGLPPRAAWRGIAISGLLWFGFYMVVLNWGEQQVDAGTAALVVNVGPILIALLGARLLGDALPPRLLTGMAVSFAGAVTVGLSMSGEGGSSLFGVVLCLLAAVAYAGGVVAQKPALAHASALQVTTFGCLVGAVLCLPFAGQLVHEAAGAPVSATLNMVYLGVFPTALAFTTWAYALARTTAGRMGATTYAVPALVVLMSWLALGEVPGLLTLAGGALCLAGVAVSRSRRRPAAVPDRAAPTAEPRREDAGRA

SEQ ID NO: 114 - protein, 334 aa, Streptomyces coelicolor
MPVHTSDSARGSRGKGIGLGLALASAVAFGGSGVAAKPLIEAGLDPLHVVWLRVAGAALVMLPLAVRHRALPRRRPALVAGYGLFAVAGVQACYFAAISRIPVGVALLVEYLAPALVLGWVRFVQRRPVTRAAALGVVLAVGGLACVVEVWSGLGFDALGLLLALGAACCQVGYFVLSDQGSDAGEEAPDPLGVIAYGLLVGAAVLTIVARPWSMDWSVLAGSAPMDGTPVAAALLLAWIVLIATVLAYVTGIVAVRRLSPQVAGVVACLEAVIATVLAWVLLGEHLSAPQVVGGIVVLAGAFIAQSSTPAKGSADPVARGGPERELSSRGTST

SEQ ID NO: 115 - protein, 297 aa, Erwinia chrysanthemi
MKLKDFAFYAPCVWGTTYFVTTQFLPADKPLLAALIRALPAGIILILGKNLPPVGWLWRLFVLGALNIGVFFVMLFFAAYRLPGGVVALVGSLQPLIVILLSFLLLTQPVLKKQMVAAVAGGIGIVLLISLPKAPLNPAGLVASALATMSMASGLVLTKKWGRPAGMTMLTFTGWQLFCGGLVILPVQMLTEPLPDLVTLTNLAGYLYLAIPGSLLAYFMWFSGLEANSPVIMSLLGFLSPLVALLLGFLFLQQGLSGAQLVGVVFIFSALIIVQDISLFSRRKKVKPLEQSDCVIK

SEQ ID NO: 116 - protein, 297 aa, Erwinia chrysanthemi
MKLKDFAFYAPCVWGTTYFVTTQFLPADKPLLAALIRALPAGIILILGKTLPPVGWLWRLFVLGALNIGVFFVMLFFAAYRLPGGVVALVGSLQPLIVILLSFLLLTQPVLKKQMVAAVAGGIGIALLISLPKAPLNPAGLVASALATVSMASGLVLTKKWGRPAGMTMLTFTGWQLFCGGLVILPVQMLTEPLPDVVTLTNLAGYFYLAIPGSLLAYFMWFSGIEANSPVMMSMLGFLSPLVALFLGFLFLQQGLSGAQLVGVVFIFSAIIIVQDVSLFSRRKKVKQLEQSDCAVK

SEQ ID NO: 117 - protein, 312 aa, Lactobacillus plantarum
MKRLVGTLCGIISAALFGLGGILAQPLLSEQVLTPQQIVLLRLLIGGAMLLLYRNLFFKQARKSTKKIWTHWRILTRIMIYGIAGLCTAQIAFFSAINYSNAAVATVFQSTSPFILLVFTALKAKRLPSLLAGMSLISALMGIWLIVESGFKTGLIKPEAIIFGLIAAIGVILYTKLPVPLLNQIAAVDILGWALVIGGVIALIHTPLPNLVRFSKTQLLAVLIIVILATVVAYDLYLESLKLIDGFLATMTGLFEPISSVLFGMLFLHQILVPQALVGIILVVGAIMILNLPHHITAPVPSKTCQCTMSNQ

SEQ ID NO: 118 - protein, 294 aa, Lactobacillus plantarum
MKKIAPLFVGLGAISFGIPASLFKIARRQGVVNGPLLFWSFLSAVVILGVIQILRRARLRNQQTNWKQIGLVIAAGTASGFTNTFYIQALKLIPVAVAAVMLMQAVWISTLLGAVIHHRRPSRLQVVSIVLVLIGTILAAGLFPITQALSPWGLMLSFLAACSYACTMQFTASLGNNLDPLSKTWLLCLGAFILIAIVWSPQLVTAPTTPATVGWGVLIALFSMVFPLVMYSLFMPYLELGIGPILSSLELPASIVVAFVLLDETIDWVQMVGVAIIITAVILPNVLNMRRVRP

SEQ ID NO: 119 - protein, 302 aa, Lactobacillus plantarum
MTTNRYMKGIMWAMLASTLWGVSGTVMQFVSQNQAIPADWFLSVRTLSAGIILLAIGFVQQGTKIFKVFRSWASVGQLVAYATVGLMANMYTFYISIERGTAAAATILQYLSPLFIVLGTLLFKRELPLRTDLIAFAVSLLGVFLAITKGNIHELAIPMDALVWGILSGVTAALYVVLPRKIVAENSPVVILGWGTLIAGILFNLYHPIWIGAPKITPTLVTSIGAIVLIGTIFAFLSLLHSLQYAPSAVVSIVDAVQPVVTFVLSIIFLGLQVTWVEILGSLLVIVAIYILQQYRSDPASD

SEQ ID NO: 120 - protein, 324 aa, Streptomyces coelicolor
MSNAVSGLPVGRGLLYLIVAGVAWGTAGAAASLVYRASDLGPVALSFWRCAMGLVLLLAVRPLRPRLRPRLRPRLRPAVREPFARRTLRAGVTGVGLAVFQTAYFAAVQSTGLAVATVVTLGAGPVLIALGARLALGEQLGAGGAAAVAGALAGLLVLVLGGGSATVRLPGVLLALLSAAGYSVMTLLTRWWGRGGGADAAGTSVGAFAVTSLCLLPFALAEGLVPHTAEPVRLLWLLAYVAAVPTALAYGLYFAGAAVVRSATVSVIMLLEPVSAAALAVLLLGEHLTAATLAGTLLMLGSVAGLAVAETRAAREARTRPAPA

SEQ ID NO: 121 - protein, 334 aa, Streptomyces coelicolor
MNVLLSAAFVLCWSSGFIGAKLGAQTAATPTLLMWRFLPLAVALVAAAAVSRAAWRGLTPRDAGRQIAIGALSQSGYLLSVYYAIELGVSSGTTALIDGVQPLVAGALAGPLLRQYVSRGQWLGLWLGLSGVATVTVADAGAAGAEVAWWAYLVPFLGMLSLVAATFLEGRTRVPVAPRVALTIHCATSAVLFSGLALGLGAAAPPAGSSFWLATAWLVVLPTFGGYGLYWLILRRSGITEVNTLMFLMAPVTAVWGALMFGEPFGVQTALGLAVGLAAVVVVRRGGGARRERPVRSGADRPAAGGPTADQPTNRPTDRPTAAGSTDRPTADRR

SEQ ID NO: 122 - protein, 312 aa, Thermobifida fusca
MSDFRKGVLYGASSYFMWGFLPLYWPLLTPPATAFEVLLHRMIWSLVVTLVVLLVQRNWQWIRGVLRSPRRLLLLLASAALISLNWGAFITAVTTGHTLQSALAYFINPLVSVALGLLVFKERLRPGQWAALLLGVLAVAVLTVDYGSLPWLALAMAFSFAVYGALKKFVGLDGVESLSAETAVLFLPALGGAVYLEVTGTGTFTSVSPLHALLLVGAGVVTAAPLMLFGAAAHRIPLTLVGLLQFMVPVMHFLIAWLVFGEDLSLGRWIGFAVVWTALVVFVVDMLRHARHTPRPAPSAPVAEEAEETAAS

SEQ ID NO: 123 - protein, 362 aa, Streptomyces coelicolor
MAGSSRSDQRVGLLNGFAAYGMWGLVPLFWPLLKPAGAGEILAHRMVWSLAFVAVALLFVRRWAWAGELLRQPRRLALVAVAAAVITVNWGVYIWAVNSGHVVEASLGYFINPLVTIAMGVLLLKERLRPAQWAAVGTGFAAVLVLAVGYGQPPWISLCLAFSFATYGLVKKKVNLGGVESLAAETAIQFLPALGYLLWLGAQGESTFTTEGAGHSALLAATGVVTAIPLVCFGAAAIRVPLSTLGLLQYLAPVFQFLLGVLYFGEAMPPERWAGFGLVWLALTLLTWDALRTARRTARALREQLDRSGAGVPPLKGAAAAREPRVVASGTPAPGAGDAPQQQQQQQQQQQQQQHGTRAGKP

SEQ ID NO: 124 - protein, 341 aa, Lactobacillus plantarum
MKKAYLYIAISTLMFSSMEIALKMAGSAFNPIQLNLIRFFIGAIVLLPFALRALKQTGRKLVSADWRLFALTGLVCVIVSMSLYQLAITVDQASTVAVLFSCNPVFALLFSYLILRERLGRANLISVVISVIGLLIIVNPAHLTNGLGLLLAIGSAVTFGLYSIISRYGSVKRGLNGLTMTCFTFFAGAFELLVLAWITKIPAVANGLTAIGLRQFAAIPVLVNVNLNYFWLLFFIGVCVTGGGFAFYFLAMEQTDVSTASLVFFIKPGLAPILAALILHEQILWTTVVGIVVILIGSVVTFVGNRFRERDTMGAIEQPTAAATDDEHVIKAAHAVSNQEN

SEQ ID NO: 125 - protein, 471 aa, Thermobifida fusca
MNADTLLWSLLLGVIVVAAAAAIIIPTVRNSSTAPPPGAVGTALGAALTAAALGIAGSGTAPASEVPAGSGQVRTVDVVLGDMTVSPSHVTVAPGDSLVLRVRNEDTQVHDLVVETGARTPRLAPGDSATLQVGTVTEPIDAWCTVLGHSAAGMRMRIDTTDTADSADSPDTPAGADSGPPAPLPLSAEMSDDWQPRDAVLPPAPDRTEHEVEIRVTETELEVAPGVRQSVWTFGGDVPGPVLRGKVGDVFTVTFVNDGTMGHGIDFHASSLAPDEPMRTINPGERLTYRFRAEKAGAWVYHCSTSPMLQHIGNGMYGAVIIDPPDLEPVDREYLLVQGELYLGEPGSADQVARMRAGEPDAWVFNGVAAGYAHAPLTAEVGERVRIWVVAAGPTSGTSFHIVGAQFDTVYKEGAYLVRRGDAGGAQALDLAVAQGGFVETVFPEAGSYPFVDHDMRHAENGARGFFTITE

SEQ ID NO: 126 - protein, 301 aa, Coryne-bacterium glutamicum
MSTGLTAKTGVEHFGTVGVAMVTPFTESGDIDIAAGREVAAYLVDKGLDSLVLAGTTGESPTTTAAEKLELLKAVREEVGDRAKLIAGVGTNNTRTSVELAEAAASAGADGLLVVTPYYSKPSQEGLLAHFGAIAAATEVPICLYDIPGRSGIPIESDTMRRLSELPTILAVKDAKGDLVAATSLIKETGLAWYSGDDPLNLVWLALGGSGFISVIGHAAPTALRELYTSFEEGDLVRAREINAKLSPLVAAQGRLGGVSLAKAALRLQGINVGDPRLPIMAPNEQELEALREDMKKAGVL

SEQ ID NO: 127 - protein, 292 aa, Escherichia coli
MFTGSIVAIVTPMDEKGNVCRASLKKLIDYHVASGTSAIVSVGTTGESATLNHDEHADVVMMTLDLADGRIPVIAGTGANATAEAISLTQRFNDSGIVGCLTVTPYYNRPSQEGLYQHFKAIAEHTDLPQILYNVPSRTGCDLLPETVGRLAKVKNIIGIKEATGNLTRVNQIKELVSDDFVLLSGDDASALDFMQLGGHGVISVTANVAARDMAQMCKLAAEGHFAEARVINQRLMPLHNKLFVEPNPIPVKWACKELGLVATDTLRLPMTPITDSGRETVRAALKHAGLL

SEQ ID NO: 128 - DNA, 906 bp, Coryne-bacterium glutamicum
atgagcacaggtttaacagctaagaccggagtagagcacttcggcaccgttggagtagcaatggttactccattcacggaatccggagacatcgatatcgctgctggccgcgaagtcgcggcttatttggttgataagggcttggattctttggttctcgcgggcaccactggtgaatccccaacgacaaccgccgctgaaaaactagaactgctcaaggccgttcgtgaggaagttggggatcgggcgaagctcatcgccggtgtcggaaccaacaacacgcggacatctgtggaacttgcggaagctgctgcttctgctggcgcagacggccttttagttgtaactccttattactccaagccgagccaagagggattgctggcgcacttcggtgcaattgctgcagcaacagaggttccaatttgtctctatgacattcctggtcggtcaggtattccaattgagtctgataccatgagacgcctgagtgaattacctacgattttggcggtcaaggacgccaagggtgacctcgttgcagccacgtcattgatcaaagaaacgggacttgcctggtattcaggcgatgacccactaaaccttgtttggcttgctttgggcggatcaggtttcatttccgtaattggacatgcagcccccacagcattacgtgagttgtacacaagcttcgaggaaggcgacctcgtccgtgcgcgggaaatcaacgccaaactatcaccgctggtagctgcccaaggtcgcttgggtggagtcagcttggcaaaagctgcttcgcgtctgcagggcatcaacgtaggagatcctcgacttccaattatggctccaaatgagcaggaacttgaggctctccgagaagacatgaaaaaagctggagttctataa

SEQ ID NO: 129 - DNA, 879 bp, Escherichia coli
atgttcacgggaagtattgtcgcgattgttactccgatggatgaaaaaggtaatgtctgtcgggctagcttgaaaaaactgattgattatcatgtcgccagcggtacttcggcgatcgtttctgttggcaccactggcgagtccgctaccttaaatcatgacgaacatgctgatgtggtgatgatgacgctggatctggctgatgggcgcattccggtaattgccgggaccggcgctaacgctactgcggaagccattagcctgacgcagcgcttcaatgacagtggtatcgtcggctgcctgacggtaaccccttactacaatcgtccgtcgcaagaaggtttgtatcagcatttcaaagccatcgctgagcatactgacctgccgcaaattctgtataatgtgccgtcccgtactggctgcgatctgctcccggaaacggtgggccgtctggcgaaagtaaaaaatattatcggaatcaaagaggcaacagggaacttaacgcgtgtaaaccagatcaaagagctggtttcagatgattttgttctgctgagcggcgatgatgcgagcgcgctggacttcatgcaattgggcggtcatggggttatttccgttacgactaacgtcgcagcgcgtgatatggcccagatgtgcaaactggcagcagaagaacattttgccgaggcacgcgttattaatcagcgtctgatgccattacacaacaaactatttgtcgaacccaatccaatcccggtgaaatgggcatgtaaggaactgggtcttgtggcgaccgatacgctgcgcctgccaatgacaccaatcaccgacagtggtcgtgagacggtcagagcggcgcttaagcatgccggtttgctgtaa

SEQ ID NO: 130 - DNA, 1173 bp, Mycobacterium tuberculosis
atgcaggacagcatcttcaatctgttgaccgaggaacagcttcggggtcgcaacacgctcaagtggaactatttcgggcccgatgtagtgccactgtggctggcggagatggactttcccaccgcaccggctgtgctcgacggggtgcgggcgtgcgtcgacaacgaggagttcggctacccgccgttgggcgaggacagcctgccgagggcgacggccgattggtgccgacaacgctacggttggtgcccccgaccggactgggtccgcgtcgtgccggatgtcctgaaggggatggaagtcgtcgtcgaattccttacccggccggagagtccggtcgcgttgccggttccggcttacatgccgtttttcgacgtcctgcacgtcaccggccgccaacgagtggaagtcccaatggtgcagcaagactcgggacgctacctgctggacctggacgctctgcaggccgcgttcgtccgcggtgccggatcggtgattatctgcaatccgaataacccactgggtacggcgttcaccgaagccgagctacgtgcgattgtggatatcgcggcccgccacggcgcccgggtgatcgcggatgagatctgggcaccggtggtctacggatcgcgccatgtcgccgccgcttcggtgtcggaggcggcggctgaagtcgtggtcacgttggtgtcggcgtccaaaggctggaacttgccgggtctgatgtgcgctcaggtgatcctgtctaaccgccgtgacgcccacgactgggaccggatcaacatgttgcaccgcatgggcgcatcaacggtcggtatccgcgcgaacatcgccgcctaccatcatggcgaatcttggttggacgagctgctcccttatctgcgggcgaaccgtgatcatctggcacgggcgctgccggagttagctcccggggtagaggtcaacgctccggacggtacctacctgtcgtgggtggatttccgtgcgctggctctgccgtctgaaccggcggaatacctgctctcgaaggcgaaggtggcgctgtcgcctggcattccgttcggcgccgcggtgggctcgggatttgcgcggctgaacttcgccaccacccgcgcaatactggatcgggcgatcgaggctatcgcggccgccctgcgcgacatcatcgattaa

SEQ ID NO: 131 - DNA, 1254 bp, Bifidobacterium longum
atgagcatgaacaacattccccagtcaacgactgtgagcaacgcaaccgccgacgtctcttgctttgatgccaatcacatcgacgtgacgaccatcgaggatctgaagcaggtcggttcggataaatggacccgctaccccggctgcatcggcgcattcatcgccgagatggattacggtctggcaccatgcgtggccgaagccatcgaagaggccaccgaacgtggcgcgctcggctacattcccgacccgtggaagaaggaggtcgcccgctcgtgcgccgcatggcagcgccgctacggctgggatgtggatccgacgtgcatccgcccggtgccggacgtgctggaggcgttcgaagtgttcctgcgcgagatcgtgcgcgccggcaactccatcgtggtaccgactccggcctatatgccgttcctgagcgtgccgcgtctgtatggcgtggaggtccttgagattccgatgctgtgcgcgggcgccagcgagagcagcgggcgcaatgatgaatggctgttcgatttcgacgccattgagcaggcgttcgcgaacggctgccatgccttcgtgctgtgcaacccgcacaacccgatcggcaaggtattgacgcgcgaggaaatgctgcgattgtccgatctggccgccaagtacaacgtgcgtatattctccgatgagattcacgcgccgttcgtctaccaaggccacacgcatgtgccattcgcctcaatcaaccggcagacggccatgcaggctttcacctccacttcagcctcgaagtcgttcaacattcccggcaccaagtgcgcgcaggtgattctcaccaatccggacgatctggaactatggatgaggaacgcggaatggtccgagcaccagacggccaccatcggtgccatagccaccactgcggcctatgacggcggcgcggcatggttcgagggcgtgatggcatatatcgagcgcaatatcgcgctggtcaacgagcagatgcgcacgagattcgccaaggtgcgctatgtggagccgcagggcacgtatatcgcgtggctggatttctcgccactgggcatcggcgacccggccaactatttctttaagaaggccaacgtggcgttgacagacggccgtgaatgcggcgaggtcgggcgcggttgcgtgcgtatgaacttcgccatgccctacccgctactggaggaatgcttcgaccgcatggccgccgcacttgaggcggacgggttgttgtag

SEQ ID NO: 132 - DNA, 1164 bp, Lactobacillus plantarum
atgcaatatgattttaataaggttataaatcgtagagggacatacagtactcagtgggattatattcaagatcgctttggtcgttctgacattctaccattttcaatttcagatactgactttccggttcccgttggcgtccaagaggcgcttgaacagcgtattaagcatcctatttatggttatacacgctggaataatgaggattacaaaaatagtattattaattggtttagctctcaaaatcaagttactataaacccagattggattttatatagtcccagtgttgttttttcaattgccacctttattcgaatgaagtcagccgttggagaaagtgtagcggtcttcactcctatgtatgacgccttttatcatgtgattgaggataatcagcgggtgttagcgccggtcagactaggcagtgcacaacaagactatagtatcgattgggatactttgaaagctgttttaaagcaaacagcaacaaaaattttacttttgactaatccacataatcctaccgggaaggtcttttcagatgatgaattgaagcatatagttgcactatgtcaacaatataatgtctttataatttcagatgatattcataaggacattgtgtatcaaaaggcagcatatacgcctgtaaccgaatttacaactaagaatgtggtcctatgttgttcagctactaaaacttttaatacccctgggttgattggcgcatatttatttgagcctgaggctgaactacgtgagatgtttttatgtgaattaaagcaaaaaaatgctttatcatcagctagcatccttggaattgaatctcagatggctgcttataatactggaagtgactatttagtacaactcataacgtatttgcaaaataactttgattatctatctactttcttaaaaagtcagttaccagagattagatttaagcagcctgaagcgacttatttggcttggatggatgtctcgcaattggggctaacggctgaaaaactacaagataaacttgttaatacgggtcgagttgggatcatgtcggggacaacatatggtgacagtcattatttacgtatgaatattgcttgtcctatttctaaattgcaggaaggactgaaaagaatggagtacgggatccgttcgtaa

SEQ ID NO: 133 - DNA, 1386 bp, Streptomyces coelicolor
gtgcccgccgtgccagaaagggcccctgtgacgacgcgaagcgagacgcagtccaccctcgaccacctcctcaccgagatcgagctgcgcaacccggcccagcccgagttccaccaggcggcccacgaggtcctggagaccctggcgccggtcgtcgcggcccgccccgagtacgccgagccgggcctcatcgagcggctggtcgagccggagcgccaggtgatgttccgggtgccgtggcaggacgaccagggccgcgtccgcgtcaaccggggcttccgggtcgagttcaacagcgcgctgggcccgtacaagggcggtctgcgcttccatccgtccgtcaacctgggcgtcatcaagttcctgggcttcgagcagatcttcaagaacgcgctgaccggcctcggcatcggcggcggcaagggcggcagcgacttcgacccgcacgggcgcagcgacgcggaggtcatgcggttctgccagtccttcatgacggagctgtaccggcacatcggcgagcacacggacgtcccggcgggggacatcggcgtcgggggccgcgagatcggctacctcttcggccagtaccggcggatcaccaaccgctgggagtccggcgtcctgaccggcaagggccagggctggggcggctcgctgatccgcccggaggcgaccggctacggcaacgtgctgttcgcggcggcgatgctgcgggagcgcggcgaggacctggagggccagaccgcggtcgtctccggctccggcaacgtggcgatctacaccatcgagaagctgaccgccctcggcgccaacgccgtcacctgctcggactcctccggctacgtcgtcgacgagaagggcatcgacctcgacctgctcaagcagatcaaggaggtcgagcgcggccgcgtcgacgcgtacgccgagcgccggggcgcctcggcccgcttcgtgcccggcggcagcgtctgggacgttccggccgaccttgccctcccctccgccacgcagaacgagctggacgagaacgccgccgccacgctcgtccgcaacggcgtcaaggcggtctccgagggcgcgaacatgccgaccacccccgaggccgtccacctgctccagaaggcgggcgtcgccttcggccccggcaaggcggccaacgcgggcggcgtcgcggtcagcgccctggagatggcgcagaaccacgcccgtacctcgtggacggcggcgcgggtcgaggaggagctggccgacatcatgaccagcatccacaccacctgccacgagaccgccgagcgctacgacgcccccggcgactacgtcaccggcgcgaacatcgccggcttcgagcgggtggccgacgcgatgctggcgcagggcgtcatctga

SEQ ID NO: 134 - DNA, 1383 bp, Thermobifida fusca
gtgcgccccgaaccggaggcgaccatgtcggcgaatctcgatgagaaactgtccccgatctacgaggaaatcctgcggcgtaacccgggggaggtcgagttccaccaggctgttcgcgaagtcctggagtgcctcggccccgtggtggccaagaaccctgacatcagccacgccaagatcatcgagcggctctgtgagccggagcgccagctgatcttccgggtgccctggatggacgactccggtgagatccacgtcaaccggggtttccgggtggagttcagcagctctttgggaccttacaagggcgggctgcggttccacccgtcggtgaacctgagcatcatcaagttcctcgggttcgagcagatcttcaagaactcgctgaccggattgccgatcggcggtgcgaaaggcggcagcgacttcgacccgaagggccgttccgacgccgagatcatgcggttctgccagtcgttcatgacggagctgtaccggcacctgggtgagcacacggacgtgcctgccggtgacatcggcgtgggccagcgtgagatcggctacctgttcggccagtacaagcggatcaccaaccgctacgagtcgggcgtgttcaccggtaagggcctcagttggggcggttcccaggtgcgtcgtgaggccaccgggtacggctgtgtgctcttcactgcggagatgctgcgagcccgcggcgactcgctggaaggcaagcgggtctcggtgtcgggttcgggcaatgtggcgatctacgcgatcgagaaggcccagcagctcggcgcgcatgtggtgacctgctcggactccaacggctacgtggtggacgagaaggggatcgacctggagctgctcaagcaggtcaaggaggtcgaacgcggccgggtgtccgactacgccaagcggcgcggctcccacgtccgctacatcgactcgtcgtcgtccagcgtgtgggaggtgccctgcgacatcgcgctgccgtgcgcgacgcagaacgagctgaccggccgcgacgctatcaccctggtgcgcaacggggtgggcgcggtggcggagggcgcgaacatgcccacgaccccggaggggatccgggtgttcgcggaggcgggcgtagcgttcgcgccgggcaaggccgcgaacgcgggcggggtggcgacgagcgcgttggagatgcagcagaacgcgtcccgcgactcgtggtcgttcgagtacaccgagaagcggctcgcggaaatcatgcgccacatccacgacacctgctatgagacggcggaacgctatgggcggcccggcgactatgtggcaggtgccaacatcgctgctttcgagatcgtcgctgaggcgatgctcgctcagggcctgatctga

SEQ ID NO: 135 - DNA, 1347 bp, Lactobacillus plantarum
ttgagtcaagcaaccgattatgtccaacatgtttaccaagtcattgaacaccgtgatccgaaccaaaccgaatttttagaggccatcaacgacgtcttcaaaacgatcacgccagtcctcgaacaacatccagaatatatcgaagccaatattttggaacgtttgaccgaaccagaacggattattcaattccgggttccttggctcgacgatgctggtcatgcacgagtcaaccgtgggttccgagtacaatttaactcagcaatcggtccttacaagggcggcttacggttacacccatccgttaatctgagtatcgtcaaattcttgggctttgaacagatcttcaaaaatgccctgaccggcctaccaattggcggtggtaaagggggctctgatttcgaccctaagggcaaatcagacaacgaaattatgcgcttctgtcagagtttcatgaccgaactgagcaagtacattggtctcgatactgacgttcctgctggtgatatcggtgttggtggccgcgaaatcggctttttatacggccaatacaagcgactccggggcgctgaccgcggcgtactcaccggtaaaggattgaactatggcggttcgttagcccggactgaagctaccggttatggtctcgcctactataccaacgaaatgctcaaggccaaccaactttccttccctggtcaacgcgttgccatttctggtgctggtaatgtcgccatctacgcgattcaaaaggttgaagaactcggtggcaaggtgattacttgctccgactcaaacggttacgttattgacgaaaacggtatcgacttcaagatcgttaagcagatcaaggaagttgaacgcggtcgtatcaaagactatgccgaccgtgtagccagtgccagctattacgaaggttccgtctgggacgcccaagtagcttatgatatcgcgttaccttgcgccacccaaaacgaaatcagcggtgatcaagccaagaacttgattgccaatggtgccaaggtcgttgccgaaggggctaacatgcctagcagtccagaagccattgcgacataccaagctgccagcttgctatatggtccggccaaagctgccaatgctggtggcgttgccgtttccgcccttgaaatgagccaaaatagtatgcgtttgagctggacttttgaagaagtcgataatcgcctcaagcaaatcatgcaagatatctttgcacactccgttgccgctgccgacgaataccacgttagcggtgattacctgagtggtgctaacattgctggcttcacaaaagttgctgacgccatgttagcgcaaggcttagtttaa

SEQ ID NO: 136 - DNA, 981 bp, Bacillus sphaericus
atgagtgcaattcgagtaggtattgtcggttatggaaatttagggcgcggtgttgaattcgctatttcacaaaatccagatatggaattagtagcggtattcactcgtcgcgatccttcaacagtgagcgttgcaagtaacgcgagcgtatatttagtagatgatgctgaaaaatttcaagatgacattgatgtaatgattttatgtggtggctctgcaacagatttacctgagcaaggtccacactttgcgcaatggtttaatacaattgatagttttgatactcatgcgaaaattccagagtttttcgatgcggttgacgctgctgctcaaaaatctggtaaagtatctgttatctctgtaggttgggatccaggtctattttctttaaatcgtgttttaggcgaggcagtattacctgtaggtacaacgtatacattctggggtgatggcttaagtcaaggtcactcggatgcagttcgtcgtattgaaggggttaaaaatgctgtacagtatacattacctatcaaagatgctgttgaacgtgttcgtaatggtgagaatccagagcttactacacgtgaaaagcatgcacgtgaatgctgggtagtgcttgaagaaggtgcagatgcgccaaaagtagagcaagaaattgtaacaatgccgaactatttcgatgagtataacacaactgtaaactttatctctgaagatgagtttaatgccaaccatacaggcatgccacatggtggcttcgttattcgtagtggtgaaagcggcgctaatgataaacaaattttagaattctcgttaaaacttgaaagtaatccaaacttcacgtcaagtgtccttgtggcttatgcacgtgcagcacaccgcttaagtcaagcgggtgaaaaaggtgcaaaaacagtattcgatattccgttcggtctgttatctccaaaatcagctgcacaattacgtaaggaactattataa

SEQ ID NO: 137 - DNA, 1605 bp, Thermobifida fusca
atggcgacccaagcccctgaaccgctgcccgcggaccagatcgacattcgcaccaccgcgggcaaactcgcagacctgcagcgacgccgctacgaggcggtccacgcaggctccgaacgagccgtagcaaaacagcacgccaagggcaagatgaccgcccgcgagcgcatcgacgccctgctcgacccgggctccttcgtggagttcgacgccttcgcgcgtcaccggtccaccaacttcggcttggagaagaaccgcccctacggcgacggcgtcgtcaccggctacggcaccatcgacggccgaccggtcgccgtgttcagccaggacgtcaccgtcttcggcggttccctcggcgaggtctacggcgagaagatcgtcaaagtcctcgaccatgcgctcaaaaccggctgcccggtcatcggcatcaacgaaggcggcggcgcgcgcatccaagagggcgtggtggcgctgggcctctacgccgagattttcaaacgcaacacccacgcctccggggtcatcccccagatctcgctcgtcatgggggcagcagcaggcggccacgtctactcgcccgccctcaccgacttcatcgtcatggtcgaccagacctcccagatgttcatcaccgggcccgacgtcatcaagacggtcaccggtgaagacgtcaccatggaggagctgggcggcgcacgcacccacaacaccaagtcgggcgtggcccactacatggcctccgacgagcacgacgccctggagtacgtcaaggcgctgctgtcctacctgccctccaacaacctggacgagccgcccgtcgaacccgtccaggtgaccctggaggtgaccgaggaagaccgggagctggacaccttcatccccgactcggccaaccagccctacgacatgcgccgcgtcatcgaacacatcgtggacgacggggagttcctggaagtccacgaactgttcgcgcagaacatcatcgtgggcttcggccgggtcgaaggccacccggtaggtgtcgtcgccaaccagccgatgaacctcgcgggctgcctggacatcgacgcctccgagaaagccgcccggttcgtccgcacctgcgacgccttcaacatccccgtgctgaccctggtcgacgtccccggcttcctgcccggaaccgaccaggagttcggcggcatcatccggcgcggcgccaaactgctctacgcctacgctgaggcgaccgtccccctggtgaccatcatcacccgcaaagcgttcggcggcgcctacgacgtcatgggctccaagcacctgggtgcagacatcaacctggcgtggccgaccgcgcagatcgcggtcatgggagcccagggtgccgtcaacatcctgcaccggcgtaccctcgccgccgccgacgacgtcgaagcgacccgcgcccagctcatcgccgaatacgaagacactctgctcaacccgtacagcgcggccgaacggggctacgtcgacagcgtcatcatgccgtcggaaacccgcacgtccgtcatcaaagccctgcgtgcgctgcgcggcaaacgcaagcagctcccgcccaagaagcacgggaatatcccactctga

SEQ ID NO: 138 - DNA, 1593 bp, Streptomyces coelicolor
atgtccgagccggaagagcagcagcccgacatccacacgaccgcgggcaagctcgcggatctcaggcgccgtatcgaggaagcgacgcacgccggttccgcacgcgccgtcgagaagcagcacgccaagggcaagctgacggctcgtgaacgcatcgacctcctcctcgacgagggttccttcgtcgagctggacgagttcgcccggcaccgctccaccaacttcggcctcgacgccaaccgcccctacggcgacggcgtcgtcaccggctacggcaccgtcgacggccgccccgtggccgtcttctcccaggacttcaccgtcttcggcggcgcgctgggcgaggtctacggccagaagatcgtcaaggtgatggacttcgccctcaagaccggctgcccggtcgtcggcatcaacgactccggcggcgcccgcatccaggagggcgtggcctccctcggcgcctacggcgagatcttccgccgcaacacccacgcctccggcgtgatcccgcagatcagcctggtcgtcggcccgtgtgcgggcggcgcggtgtactcccccgcgatcaccgacttcacggtgatggtggaccagaccagccacatgttcatcaccggtcccgacgtcatcaagacggtcaccggcgaggacgtcggcttcgaggagctgggcggcgcccgcacccacaactccacctcgggcgtggcccaccacatggccggcgacgagaaggacgcggtcgagtacgtcaagcagctcctgtcgtacctgccgtccaacaacctctccgagccccccgccttcccggaggaggcggacctcgcggtcacggacgaggacgccgagctggacacgatcgtcccggactcggcgaaccagccctacgacatgcactccgtcatcgagcacgtcctggacgacgccgagttcttcgagacgcaacccctcttcgcgccgaacatcctcaccggcttcggccgcgtggagggccgcccggtcggcatcgtcgccaaccagcccatgcagttcgccggctgcctggacatcacggcctccgagaaggcggcccgcttcgtgcgcacctgcgacgccttcaacgtccccgtcctcaccttcgtggacgtccccggcttcctgcccggcgtcgaccaggagcacgacggcatcatccgccgcggcgccaagctgatcttcgcctacgccgaggccacggtgccgctcatcacggtcatcacccgcaaggccttcggcggcgcctacgacgtcatgggctccaagcacctgggcgccgacctcaacctggcctggcccaccgcccagatcgccgtcatgggcgcccaaggcgcggtcaacatcctgcaccgccgcaccatcgccgacgccggtgacgacgccgaggccacccgggcccgcctgatccaggagtacgaggacgccctcctcaacccctacacggcggccgaacgcggctacgtcgacgccgtgatcatgccctccgacactcgccgccacatcgtccgcggcctgcgccagctgcgcaccaagcgcgagtccctgcccccgaagaagcacggcaacatccccctgtaa

SEQ ID NO: 139 - DNA, 1647 bp, Mycobacterium tuberculosis
atgacaagcgttaccgaccgctcggctcattccgcagagcggtccaccgagcacaccatcgacatccacaccaccgcgggcaagctggcggagctgcacaaacgcagggaagagtcgctgcaccccgtcggtgaggatgccgtcgaaaaagtacacgccaagggcaagctgacggctcgcgagcgtatctacgcgttgctggatgaggattcgttcgtcgagctggacgcgctggccaaacaccgcagcaccaacttcaatctcggtgaaaaacgcccgctcggcgacggcgtggtcaccggctacggcaccatcgacgggcgcgacgtgtgcatcttcagccaggacgccacggtgtttggcggcagccttggcgaggtgtacggcgagaaaatcgtcaaggtccaggaactggcgatcaagaccggccgtccgctcatcggcatcaacgacggtgctggcgcgcgcatccaggaaggtgtcgtctcgctgggcctgtacagccgtatctttcgcaacaacatcctggcctccggcgtcatcccgcaaatctcgttgatcatgggagccgccgccggtgggcacgtctactcccccgccctgaccgacttcgtgatcatggtcgatcagaccagccagatgttcatcaccgggcccgacgtcatcaagaccgtcaccggcgaggaagtcaccatggaagaactcggcggcgcccacacccacatggccaagtcgggtacggcacactacgccgcatcgggcgaacaggacgccttcgactacgttcgcgagctgctgagctacctgccgcccaacaactccaccgacgcgccccgataccaagccgcagccccgacagggcccatcgaggagaacctcaccgacgaggacctcgaattggatacgctgatcccggactcgcccaaccagccctatgacatgcacgaggtgatcacccggctcctcgacgacgaattcctggagatacaggccggttacgcccaaaacatcgtggtggggttcgggcgcatcgacggccggccagtcggcattgtcgccaaccagccgacacacttcgccggctgcctggatatcaacgcctcggagaaagcggcccggtttgtgcggacctgcgactgcttcaatatccccatcgtcatgctggtggacgtcccgggcttcctgccgggcaccgaccaggaatacaacggcatcatccggcgcggcgccaagctgctctacgcctacggcgaggccaccgtgccaaagatcacggtcatcacccgcaaggcctacggcggtgcgtactgcgttatgggctccaaagacatgggctgcgacgtcaacctggcgtggccgaccgcgcagatcgcggtgatgggcgcctccggcgcagtgggcttcgtgtaccgccagcagctggccgaggccgccgccaacggcgaggacatcgacaagctgcggctgcggctccagcaggagtacgaggacacactggtcaacccgtacgtggccgccgaacgcggatacgtcgacgcggtgatcccgccgtcgcatactcgcggctacatcgggaccgcgctgcggctgctggaacgcaagatcgcgcagctgccgcccaaaaagcatgggaacgtgcccctgtga

SEQ ID NO: 140 - DNA, 1650 bp, Mycobacterium leprae
atgacaagcgttaccgaccactcggctcattcaatggaacgcgctgccgagcacacgatcaatatccacaccacggcaggcaagctggccgagctgcataagcggaccgaagaagcgctgcatccggtcggtgcagctgccttcgagaaggtacacgctaagggtaagtttaccgcccgcgagcgcatctacgccctattggacgacgactcattcgtcgaactcgacgcactggccagacaccgcagcaccaacttcggcctcggtgaaaaccgcccggtaggcgatggcgtggtcaccggctacggcaccatcgacggccgcgacgtatgcatcttcagccaggacgtcacggtgttcggcggcagcctgggcgaagtgtatggcgagaagatcgtcaaggtccaggaactggcgatcaagaccggccgtccgcttatcggcatcaacgacggcgcgggcgcgcgtatccaagaaggcgtcgtctcgctcggcctgtacagccggattttccgcaacaatatcttggcctccggcgtcatcccgcagatctcgctgatcatgggagcggccgccggtggacacgtgtattccccagcactgaccgacttcgtggttatggtcgaccaaaccagccagatgttcatcaccggacccgacgtcatcaagaccgtcaccggcgaggacgtcaccatggaggagctgggtggcgcccatacccacatggccaagtcgggtaccgcacactatgtagcatcgggcgagcaagacgccttcgattgggtgcgcgatgtgttgagctacctgccgtcaaacaacttcaccgacgcgccgcggtattctaagcccgttcctcacggctccattgaagacaacctgaccgctaaagacttggagttggacacgcttatcccggactcgccgaaccaaccgtacgacatgcacgaagtggtgacccgcctcctcgacgaggaagagttccttgaggtgcaagccggttacgccaccaacatcgtcgtcgggctcggacgcatagatgaccgaccggtgggcatcgttgccaaccaacccatccagttcgccggctgtctagacatcaacgcctcggaaaaggcagcccgatttgtgcgggtctgcgactgcttcaacatcccgatcgtgatgttggtggatgttccaggcttcctgcctggcaccgagcaagaatatgatggcatcatccgacgcggcgcaaagctgctcttcgcctacggcgaagccaccgtacccaagatcaccgtcatcacccgcaaggcctacggtggcgcttactgcgtgatgggctccaaaaatatgggctgcgacgtcaacctggcttggccgaccgcacagattgcggtgatgggtgcctccggcgcagtaggcttcgtgtaccgcaaggaactggcccaagcggccaagaacggcgccaatgttgatgagctacgcctgcagctgcagcaagagtacgaggacaccctggtgaacccgtacatcgccgccgaacgaggttacgtcgatgcggtgatcccgccgtcacacactcgcggctacattgccacggcgcttcacctgttggagcgcaagatcgcacaccttccccccaagaagcacgggaacattccgctgtga

SEQ ID NO: 141 - DNA, 3477 bp, Thermobifida fusca
atgagcgctcgactctccttccgtgaagtcctcggttcccgcgtcctcgtcgccgacggggcgatgggaacgatgcttcagacatacgacctgagcatggacgacttcgagggacacgaggggtgtaacgaggtcctcaacatcacccggcccgacgtggtccgggagatccacgaggcctacctgcaggccggcgtcgactgtgtcgaaaccaacacgttcggcgcgaacttcggaaacctcggcgaatacggcatcgcggaacgcacctacgaactggctgaagccggtgcccgcctggcccgcgaagccgccgacgcgtacaccactgccgatcacgtccgctacgtcctcggctctgtggggcccgggacgaagctgcccacccttggccacgccccgtacgctgtgctgcgcgaccactacgaacagtgcgcacgcgggctcattgacggcggtgtcgacgcgatcgtgatcgaaacctgccaggacttgctgcaggcgaaagccgcgatcgtgggggcacggcgggcccgcaaggccgcgggtaccgacacgccgatcatcgtccaggtgacgattgaaaccacggggaccatgctggtgggctccgagatcggtgcggcactgacctcgctggaaccgctaggggtcgacatgatcggcctcaactgcgctaccggtccagcagagatgagcgagcacctgcgctacctctcccaccactcccgcatccccctctcctgcatgccgaacgcgggcctgcctgagctgggggcggacggggccgtctacccgctgcagccgcatgagctcaccgaagcacacgacacgttcatccgcgagtttggcctggccctggtgggcggctgctgcggcaccacccctgagcacctcgcccaagtggtggagcgggtgcagggacgcggcgtgccggaccgcaaaccgcacgtcgaacccgccgccgcctctatctaccagagcgtcccgttccgccaggacaccagctacctggcgatcggggaacgcaccaacgccaacggctccaaggcgttccgcgaagccatgctcgcggaacgctacgacgactgtgtggagatcgcccgccagcagatccgcgacggcgcgcacatgctcgacctgtgcgtcgactatgtgggacgcgacggggtgcgcgatatgcgggagctggcttcccggctggccaccgcctccacgctgccgctcgtactggactccaccgaagtagcggtactggaagctggactggagatgctgggcgggcgcgccgtgctcaactcggtcaactacgaggacggcgacggccctgactcccggttcgccaaggtcgccgcgctggcggtggagcacggggcggccctcatggcgctgaccatcgacgagcaggggcaggcgcggaccgcggaacggaaagtggaggtcgccgagcggctcatccggcagctcaccaccgagtacggcatccgcaagcacgacatcatcgtggactgcctgaccttcacgatcgcaaccggacaggaggagtcgcggcgcgacgctctggaaaccatcgaggcgatccgtgaactgaagcggcgccacccggacgtgcagaccacgctgggcgtgtccaacgtctccttcgggctcaacccggctgcccgcattgtgctcaactcggtgttcctccacgagtgcgtccaggccggcttggactccgcgatcgtgcacgcctccaagatcctgccgatcaaccgcatccccgaggagcagcggcaggtggcgttggacatgatctacgaccgccgcaccgatgactacgacccgctgcaacgcttcctgcagcttttcgaaggagtggacgcgcaggcgatgcgcgcctcgcgcgaggaagagctggccgcgctgccgctgtgggagcgcctggagcgccgtatcgtcgacggggaagccgccggcatggaagcggacctggacgaagcgctcacccagcggtccgcgctggacatcatcaacaccacgctgctggcggggatgaagaccgtcggcgacctgttcggctccgggcagatgcagctcccgttcgtgctgaagtcggccgaggtgatgaaggccgccgtggcctatctggagccgcacatggagaaggtggacggcgacctcggcaaggggcggatcgtgctggccacggtcaagggcgacgtccacgacatcggcaagaaccttgtggacatcatcctgtccaacaacggctacgaggtcatcaacctggggatcaagcagcccatctccgcgattctggaggcggccgagcggcaccgcgccgacgtgatcggcatgtccggcctgctggtgaagtccacggtggtgatgcgggagaacctggaggagatgaacgcccgcggggtcgctgaccgctacccggtcctgctgggcggtgccgcgttgacccgctcctatgtggaacaggacctcgccgagattttcaaaggcgaggtgcgctatgcccgcgacgcttttgaaggcttgaagctcatggacgccatcatggcggtcaaacgcggggtgaagggggctaagctgccgccgctgcgcacccgccgggtgaagcggggcgcacagcttaccgtcaccgagccggagaagatgccgacgcgcagcgacgtggccaccgacaacccggtgccgaccccgccgttctggggggaccgcatctgcaaggggattccgctcgccgactacgcggctttcctggatgagcgcgccacgttcatgggccagtgggggctgcgcggctcccgcggcgacggccccacctacgaggagctggtggagacggaggggcggccgcggctgcgcatgtggctggaccggatccagaccgaggggtggctggagccggcggtcgtctacggctactaccgctgctacagcgaaggcaacgacctggtcgtcctcggtgaggacgaaaacgagctgacccggttcacgttcccgcggcagcgccgcgaccggcacctgtgcctggctgacttcttccgccccaaggagtccggggaactggacacggtggcgttccaggtcgtcaccgtcggttcgacgatcagcaaggcgaccgcggagctgttcgagaagaacgcgtaccgggactacttggagctccacgggctgtccgtgcagttgacggaggcactcgcggagtactggcacacccgggtccgcgccgagctgggcttcgccggggaggatcccgacccggccgatttggacgcctactttaagctcggctatcgaggcgcccgtttctccctggggtacggggcctgccccaacttggaggaccgcgccaagatcgtggccctgctgcgtccggaacgggttggggtgacgttgtccgaggagttccagcttgttcccgaacagtccactgacgcgatcgttgtccatcaccccgaggcgaaatacttcaacgtatga

SEQ ID NO: 142 - DNA, 3513 bp, Streptomyces coelicolor
atggcctcgtcgccatccaccccgcccgccgacacccgcacccgcgtgtccgccctccgagaggccctcgccacccgcgtggtggtcgccgacggcgccatgggcaccatgctccaggcccagaaccccacgctggacgacttccagcagctcgaagggtgcaacgaggtcctgaacctcacccggcccgacatcgtccgctcggtgcacgaggagtacttcgcggccggcgtcgactgcgtcgagaccaacaccttcggcgccaaccactccgccctgggcgagtacgacatccccgagcgcgtccacgaactgtccgaggccggcgcccgcgtcgcccgcgaggtcgccgacgagttcggcgcccgcgacggccggcagcgctgggtgctgggctccatgggccccggcaccaagctccccaccctcggccacgccccgtacaccgtcctgcgcgacgcctaccagcgcaacgccgagggactggtcgcgggcggcgcggacgcactgctggtggagaccacgcaggacctgctccagaccaaggcctcggtgctcggcgcccggcgcgccctggacgtcctcggcctcgacctgccgctcatcgtgtccgtcaccgtcgagaccaccggcaccatgctgctcggctcggagatcggcgccgcgctcaccgcgctggaaccgctcggcatcgacatgatcggcctgaactgcgccaccggccccgccgagatgagcgagcacctgcgctacctcgcccggcactcccgcatcccgctgacctgcatgcccaacgccggtctgcccgtcctcggcaaggacggcgcccactacccgctgaccgcgcccgagctggccgacgcacacgagaccttcgtgcgcgagtacggcctgtccctggtcggcggctgctgcggcaccacgcccgagcacctgcgccaggtcgtcgagcgggtccgggacaccgcccccaccgcacgcgacccgcgccccgagcccggcgccgcctcgctctaccagaccgtgcccttccgccaggacacctcctacctggccatcggcgagcgcaccaacgccaacgggtccaagaagttccgcgaggccatgctggacggccgctgggacgactgcgtcgagatggcccgcgaccagatccgcgaaggcgcgcacatgctcgacctctgcgtcgactacgtcggccgggacggcgtcgccgacatggaggaactggccggccggttcgccaccgcctccacgctgccgatcgtcctcgactccaccgaggtcgacgtcatccgggccggcctggagaagctcggcggccgcgcggtgatcaactcggtcaactacgaggacggcgccggccccgagtcccggttcgcccgcgtcacgaagctcgcccgggagcacggcgccgcgctgatcgcgctgaccatcgacgaggtgggacaggcccgcaccgccgagaagaaggtcgagatcgccgaacggctcatcgacgacctcaccggcaactggggcatccacgagtccgacatcctcgtcgactgcctgaccttcaccatctgcaccggccaggaggagtcccgcaaggacggcctggccaccatcgagggcatccgggaactcaagcggcgccacccggacgtgcagaccacgctcggcctgtcgaacatctccttcggcctcaacccggccgcccgcatcctgctcaactccgtcttcctcgacgaatgcgtcaaggccggcctggactcggccatcgtgcacgcgagcaagatcctgccgatcgcccgcttcgacgaggagcaggtcaccaccgccctcgacttgatctacgaccgccgccgcgagggctacgaccccctgcaaaagctcatgcagctcttcgagggcgccaccgccaagtcgctgaaggcctccaaggccgaggaactggccgccctcccgctggaggagcgcctcaagcgccgcatcatcgacggcgagaagaacggcctcgaacaggacctcgacgaggccctccgggagcgcccggccctcgagatcgtcaacgacaccctgctcgacggtatgaaggtcgtcggcgagctgttcggctccggccagatgcagctgccgttcgtgctccagtccgccgaggtcatgaagaccgcggtggcccacctggagccgcacatggagaagaccgacgacgacggcaagggcacgatcgtgctggccaccgtccgcggcgacgtccacgacatcggcaagaacctcgtcgacatcatcctgtccaacaacggctacaacgtcgtcaacctcggcatcaagcagcccgtctccgcgatcctggaagcggccgacgagcaccgggccgacgtcatcggcatgtccggcctcctcgtcaagtccacggtgatcatgaaggagaacctggaggagctgaaccagcgcaagctggccgccgactacccggtcatcctcggcggcgccgccctcaccagggcctacgtcgaacaggacctgcacgagatctacgacggcgaggtccgctacgcccgcgacgccttcgagggcctgcgcctcatggacgccctcatcggcatcaagcgcggcgtgcccggcgccaagctgccggagctgaagcagcgccgggtgcgggccgccaccgtcgagatcgacgagcgccccgaggaaggccacgtccgctccgacgtcgccaccgacaacccggtcccgaccccgcccttccgcggcacccgcgtcgtcaagggcatccagctcaaggagtacgcctcctggctcgacgagggcgccctcttcaagggccagtggggcctcaagcaggcccgcaccggcgagggaccctcctacgaggaactggtcgagtccgagggccggccgcggctgcgcggcctgctcgaccggctccagacggacaaccttttggaggcggccgtggtctacggctacttcccctgcgtctccaaggacgacgacctgatcgtcctcgacgacgacggcaacgaacgcacccgcttcaccttcccccgccagcgccgcggccggcgcctgtgcctggccgacttcttccgcccggaggagtccggcgagaccgacgtggtcggcttccaggtcgtcaccgtcggctcccgcatcggcgaggagacggcccgcatgttcgaggccaacgcctaccgcgactatctcgagctgcacggcctgtccgtgcagctcgccgaggccctcgccgagtactggcacgcgcgcgtgcgctcggaactcggcttcgccggggaggacccggccgagatggaggacatgttcgccctgaagtaccggggtgcccgcttctccctcggctacggcgcctgccccgacctggaggaccgcgccaagatcgccgccctgctggagcccgagcgcatcggcgtccacctatccgaggagttccagctccaccccgagcagtccaccgacgccatcgtcatccaccacccggaggccaagtacttcaacgcccgctga

SEQ ID NO: 143 - DNA, 3579 bp, Mycobacterium tuberculosis
gtgactgcggccgacaagcacctctacgacaccgatctgctcgacgtcttgtcgcagcgagtgatggtcggcgacggtgcaatgggaacccaactacaggccgcggacctcacgctcgacgacttccgcggcctggagggctgcaacgagatcctcaacgaaacccgccctgacgtgctggaaaccattcaccgcaactatttcgaagcgggcgccgacgccgtcgagacgaacacgtttggctgcaacctgtccaacctcggcgactacgacatcgccgacaggatccgcgatctatcacagaagggcaccgcgatcgcacgccgggtggccgacgagctgggcagtcccgaccgcaagcgctacgtgctggggtcgatggggccgggcaccaagctgccgactctgggccacaccgaatacgcggtgatccgcgacgcctacaccgaggccgcgctgggcatgctggacggcggagccgacgccatcctggtggaaacctgccaggacctactgcagctgaaggcggcggtgttggggtcgcggcgggcgatgacgcgggccgggcggcacattccggtgtttgcccacgtcaccgtcgagaccaccggcaccatgctgctgggcagcgagatcggggcggcgttgaccgctgtcgagccgctcggtgtggacatgatcggcttgaactgcgcgacgggtccggccgagatgagcgagcacctgcgccacctgtcccggcacgcccgcatcccggtgtcggtgatgcccaacgccgggttgccggtgctgggcgccaagggcgccgaatatccgttgctgcccgacgaattggccgaggcgctggccggcttcatcgccgagttcgggctctcgctggtcggtggctgctgcggcaccaccccggcccatatccgcgaagtggctgccgcggttgcgaacatcaagcgtcccgagcgacaggtcagctacgagccgtcggtgtcgtcgctgtacaccgcaatcccgttcgcccaggacgcctcggttctggtgatcggggagcgaacgaacgccaacggctccaagggttttcgtgaggcgatgatcgccgaggactaccagaagtgcctggacatcgccaaggaccagacccgcgacggcgcccacctgctggacctgtgtgtggactacgtgggccgcgacggtgtggccgacatgaaggcgctggccagccggctggccacgtcctcgacgctgccgatcatgctggactccaccgaaaccgcggtgctgcaggcgggtttggagcatctgggtggccgttgcgcgatcaactcggtgaactacgaggacggcgacggcccggaatcgcgctttgccaagaccatggcgctggtcgccgagcacggcgcggcggtggtcgcgctgaccatcgacgaagagggccaggcccgcaccgcgcagaagaaggtcgagatcgccgagcggctgatcaacgacatcaccggcaactggggcgtcgacgaatcatccatcctcatcgacaccttgacgttcaccatcgccaccggtcaggaggagtcccgccgcgacggcatcgagaccatcgaggcgatccgcgaactgaaaaagcgccacccggatgtgcagaccacacttggtctgtccaacatctcgtttggtctcaatcccgcagcgcgccaggtgctcaactcggtgttcctgcacgaatgccaagaagcggggctggattcggcgatcgtgcacgcgtcgaagatcctgccgatgaaccggattcccgaggagcaacgcaacgtcgccctggatctggtctacgaccgccgccgcgaggactacgatccgctgcaggagctgatgcggctgttcgaaggcgtgtcggcggcctcctcgaaagaggaccgactggctgaactagctgggctgccgctgttcgaacggctggcccaacgcatcgtcgacggcgagcgcaacggcctggacgccgatctcgacgaggcgatgacgcaaaagccgccgcttcagatcatcaacgaacatctgctggccggcatgaagacggtcggcgagctcttcggctccggccagatgcagctgccgttcgtgctgcagtcggcggaggtaatgaaagccgccgtcgcgtatctggaaccgcacatggagcgctcggacgacgattcgggcaagggacgcatcgtgctggccaccgtcaagggcgacgtgcacgacatcggcaagaacctggtcgacatcatcttgagcaacaacggctacgaagtggtcaacatcggcatcaagcagccaatcgccaccatcctcgaagtcgccgaggacaagagcgccgacgtggtcggcatgtcgggcctgctggtgaagtcgaccgtggtgatgaaggaaaacctcgaggagatgaacacccggggagtcgccgaaaagttcccggtgctgctcggcggcgcggcgttgacgcgcagctatgtcgaaaacgacctggccgagatctaccagggcgaagtgcattacgcgcgagacgctttcgagggcctgaagttgatggacaccatcatgagcgccaagcgcggcgaggcgcccgacgaaaacagcccggaagccattaaggcgcgtgagaaagaagccgaacgtaaggcccgccaccagcgatccaaacgcattgccgcacagcgcaaagccgccgaagaaccagtcgaggtgcccgaacgctccgatgtcgcggccgacatcgaggtcccggcgccgccgttctggggttcgcggatcgtcaagggcctggcggtggccgactacaccggtctgctcgatgagcgcgcattgtttttgggccagtggggtttacgcggccagcgcggcggtgagggtccgtcctacgaagatctcgtcgagaccgagggccggccgcggctgcggtactggttggaccggctgtccaccgacggcatcttggcgcacgccgccgtggtgtacggctatttcccggcggtgtccgagggcaacgacatcgtggtgctcaccgagcccaagcccgacgccccggtgcgctaccggtttcacttcccgcgccagcagcgcggtcggtttttgtgcattgccgatttcatccgctcgcgggagctggccgccgagcgtggcgaggttgacgtgctgccgttccagctggtgaccatgggtcagccgatcgcggatttcgccaacgagctgttcgcgtccaacgcctaccgcgactacctggaggtgcacggtatcggcgtgcagctcaccgaggcgctggccgagtactggcaccggcggatccgtgaggagctcaagttctccggggatcgggcgatggcggccgaggatccggaggcgaaagaagactatttcaagctcggctaccgcggtgctcgctttgccttcggctacggcgcatgcccggatctggaggaccgcgccaagatgatggcgctgctggagcccgaacgcatcggtgtgacgttatccgaggaattacagctgcatcccgaacagtcgaccgacgcgttcgtcctgcaccatccggaagccaagtacttcaacgtttaa

SEQ ID NO: 144 - DNA, 3621 bp, Mycobacterium leprae
atgcgtgtaactgccgctaaccaacatcagtacgacaccgatctcctcgagactttggcgcagcgtgtgatggtgggtgacggcgcaatgggtactcagctccaggacgcggaacttacgttagatgatttccgcggcctggagggctgcaacgagattctcaacgaaacgcgtcctgacgtgctggaaaccatccaccgacgctacttcgaggcaggtgcggacctcgtcgagaccaacactttcggctgcaacctgtccaaccttggtgactacgacatcgccgacaagatcagggacttgtcgcagcggggcaccgtgattgcgcgacgggtcgccgacgagctgaccacccccgaccacaagcgatacgtgctggggtcgatgggaccaggcaccaagttgcccaccctgggccacaccgagtaccgggtcgttcgagacgcctacaccgagtcggcgttaggcatgctggacggtggcgctgacgccgtactggttgaaacctgtcaggacttgctgcagctcaaggctgcggtgctgggctcgcggcgcgcgatgacacaggccggtcggcacattccggtcttcgtccacgtgactgtcgagacgaccggaacgatgctgctgggaagtgagatcggcgctgcactggctgccgtcgagccgctcggtgtcgacatgatcggtttgaactgcgcaacgggccccgctgagatgagtgagcatctgcggcacttgtccaagcatgcccgcatcccggtgtcggtgatgcccaacgccgggctgccggtgctgggtgccaagggagctgaatacccgctgcagcccgacgaattggccgaagctttggctgggttcatcgctgaatttggtctttcgttggtaggtggctgctgtggtaccaccccggaccacatccgggaagtggccgcagcggtagccagatgcaacgacgggacagtgccacgcggtgagcgtcatgtgacctatgagccgtcggtatcgtcgctgtatacagccattccattcgcccaaaaaccctcggttctgatgatcggtgagcgtacgaatgccaacggctccaaggtttttcgtgaggcaatgatcgccgaggactatcaaaagtgtctagatatcgccaaggaccaaacccgtggcggcgcacacctgctggatctgtgtgtcgattacgtcggccgcaacggtgtggccgacatgaaggcgttggccggtcggcttgcaacggtgtcgacattgccgatcatgctggactctaccgaaataccggtgctgcaggcaggtttggagcacctgggcgggcgctgcgtgatcaattccgtcaactacgaggacggtgacggtcccgagtcacggtttgtcaagaccatggagctggtcgccgagcacggagcggcggtggttgcgctgaccatcgacgaacagggtcaggcccgcaccgttgagaagaaggtcgaagtcgcggagcggcttatcaatgacattacgagtaactggggcgttgataaatcggcgattctcatcgattgcttgacttttactattgccactggccaggaggagtcacgcaaagacggcattgagaccatcgacgcgattcgtgagctgaagaagcggcacccagcggtgcagactacgctggggttgtccaacatctccttcggtctcaatccttctgcacgccaagttcttaactctgtttttctacatgaatgtcaggaagcaggactggattcggcgattgtgcacgcttcaaagatattgcccatcaaccggatacccgaagaacagcgccaggctgcgctggatctagtgtatgaccgccgtcgcgaaggctacgacccattgcagaagctgatgtggttattcaaaggtgtgtcgtcgccatcgtcgaaggaaacacgggaggcagaactcgctaagctgccgttgttcgaccggttagcacagcggatcgtcgacggcgagcgcaacgggttagatgttgatctcgacgaggcaatgacccagaaaccgccgttggcgatcatcaacgagaacctgctggacggcatgaagacagtcggtgaattgttcggctctgggcagatgcagctgcctttcgtgttgcagtcggccgaggttatgaaagcagcggtggcttatctagaaccgcacatggagaaatccgactgtgacttcggtaaggggttagccaaaggacggattgtgctggctaccgtcaaaggagatgtgcacgatattggcaaaaacctcgtcgatatcattctgagcaacaacggctacgaagtggtaaacctcggcatcaagcagccgattaccaacattctcgaggtggccgaggacaaaagcgccgacgtagtcgggatgtcgggcttgctggtgaaatcgactgtgatcatgaaggaaaacctcgaggagatgaacactcgcggagtcgctgagaaattcccagtgctgctcggcggcgcggcgttgacccgcagctatgtggaaaacgacctggccgaagtctatgagggcgaagtgcattacgcacgagacgctttcgagggtttgaagttgatggacaccattatgagcgccaagcgcggcgaggcgcttgcgccggggagcccggagtccttagctgcagaagcagaccgcaataaggaaactgagcgcaaggcacgtcatgagcggtccaaacgcattgcagtgcagcgtaaggctgccgaagagccagttgaggttcccgaacgctccgatgttccgagtgatgtcgaggttccggcgccgccgttctggggttcgcggatcatcaagggtctggcggtggccgactataccgggttcctcgacgagcgcgcgttgttcttgggtcagtggggattacgtggtgtgcgcggcggtgcggggccctcgtacgaggatttggtgcagaccgagggccggccgcggttgcgctactggctagaccgattgtccacctacggcgtcttggcgtacgccgccgtggtgtacggttacttcccggcggtgtccgaagacaacgatattgtcgtgctcgctgagccgagaccggacgccgagcagcggtaccggttcaccttcccgcgtcagcaacgcggtcggttcctgtgcattgccgattttattcgatcccgggatctggcgaccgagcggagtgaggtggatgttttgccgttccagctggtgaccatgggtcaacccattgctgacttcgttggcgagttgttcgtgtccaattcctatcgtgattatcttgaagtgcatggcatcggtgtgcagctaaccgaggcgctggccgaatactggcaccggcgcattcgtgaagagctgaaattctccggaaaccggacgatgtcggctgacgatcccgaggccgtcgaggactatttcaagctcggctaccgaggtgcccgcttcgcgttcgggtatggagcatgcccggacctggaggaccggatcaagatgatggagctgcttcaacccgaacgcatcggtgtaacgatatctgaagagttgcagttacatcccgagcaatcgactgatgcgttcgtgctgcaccatccggcggctaagtacttcaacgtctga

SEQ ID NO: 145 - DNA, 1857 bp, Lactobacillus plantarum
atgaagtttaaacaagcactccagcaacgggtcctcgttgccgatggcgcaatgggcacccttttatatggtaactatggcatcaattcggcttttgaaaacctgaatttgacgcatcccgacacgatcttacgcgttcaccgatcgtacattcgggctggtgccgatattattcaaaccaacacctacgctgcgaaccgcctaaagttgacccggtatgatttacaagaccaagtcaccaccatcaatcaggccgctgtgaaaattgcagcgaccgcacgggaacacgcggatcaccccgtttacattctgggaacgatcggtggactagccggcgataccgatgcaactgttcaacgggcgacaccagcaacgattgctgccagcgtgactgaacaacttaccgcccttctagccaccaaccagttagatggcatcttgctcgaaacatattatgatttgccagaactactcgccgcgttaaaaatcgtgaaggcccatactgacttgcccgtcatcacgaatgtttcaatgttagcccccggcgtcttacgaaacggtacgagcttcactgatgccatcgtccaactcaacgctgccggcgccgacgtaatcggcacgaactgtcgcctgggaccttactatttagctcagtcatttgaaaacttggcgattccagctaacgttaaactagccgtttacccaaacgctggcttgcctggcactgatcaggacggtgcggtggtctacgatggtgaaccaagctatttcgaagaatatgccgaacgctttcgtcagctcggtctgaacattattggtggttgttgtgggaccacacctttgcataccagcgcaaccgtccgcggtctaagtaatcgcagcatcgttgctcatgaccagccggctacaaaaccacagccaccaacgctcgtcacgacaaagagtcagcaccggtttctgcaaaaagttgcgacccaaaaaacggcgttagtcgaactcgatccaccccgcgattttgatacgactaaatttttccggggtgctgaacgattaaaagccgctggtgtcgatggcattacactgtctgacaattcgttagcaacggtccggattgctaatacgacgattgcggcgcagctcaagttgaactacggcatcacgccgatcgttcacttgacgacccgcgaccacaatctaatcggcttacaatcagagatcatgggtctacacagcctgggtattgaggacatcttagctatcactggcgatccggccaaactcggtgattttccgggagccacttcggtcagcgatgtgcgctccgttgaactgatgaagttgatcaagcaattcaatagcggcatcggaccaacgggtaagtcgcttaaagaagccagtgactttcgggtcgcaggcgcctttaatcctaacgcttatcgcacttccatatcgaccaagtcaatcagtcggaagttaagttatggttgtgactacattatcacccaacccgtgtatgatcttgcaaacgttgacgctttggcggatgctctagcggctaatcacgtgaatgtgccagtgttcgttggtgttatgccactcgtctcacggcgtaatgctgaatttctacaccatgaagtccatggcattcggattccagagcctatcttgacacgcatggcagaagccgaacagaccggaaacgaacgggcagtgggcattgctattgcaaaggaattgattgatggtatctgtgcgcgcttcaacggcgttcacatcgtcacaccgtttaaccgctttaaaacggtcattgaattagtcgattacatccaacagaaaaacttaattaaagtacaataa

SEQ ID NO: 146 - DNA, 2280 bp, Mycobacterium tuberculosis
gtgacccagcctgtacgtcgtcaaccctttaccgcaaccatcaccggctccccgcgcatcggcccgcgccgcgaactcaagcgcgccaccgaaggctactgggccggacgtaccagccgatccgagctggaggccgtcgccgccacgttacgccgcgacacctggtcggccctggccgcggccggtctggactcggtgccggtgaacaccttctcctactacgaccaaatgctcgataccgcggtgctgctcggcgcgctgccgccccgagtgagcccggtttccgacgggctggaccgctatttcgccgcggcgcggggcaccgaccagatcgcgccgctggagatgacgaagtggttcgacaccaactaccactacctggtacccgagatcgggccgtcgaccacgttcacgctgcaccccggcaaggtgctcgccgaactcaaagaggcgttagggcaaggcattcccgcacgtccggtgatcatcgggccgatcaccttcctgctgctgagcaaggccgtcgacggcgcgggggcgccgatcgaacgcctcgaagagttggttccggtctattcggagctgctgtcgctgcttgccgacggcggcgcccagtgggtgcagttcgacgagccggcgctggtgaccgacctctcccccgacgcgcccgccctggctgaagcggtgtacaccgcgctgtgctcggtgagcaaccggcctgcgatctatgtcgccacctacttcggggacccgggcgcggccctaccggcgctggctcgcaccccggtcgaagccatcggcgtcgacctggtggccggtgccgacacctcggtggccggggtacccgagctggccggcaagacgctggtggccggggtcgtcgacgggcgcaacgtctggcgcaccgacctggaggcggcgttgggcacgttggcgaccctgctgggttcggcggctaccgtggccgtctcgacgtcgtgctcgacactgcacgtgccgtactcgctggaaccggaaaccgacctggatgacgcgttgcggagctggctggcgttcggtgccgaaaaggtgcgcgaagtcgtcgttctcgcgcgtgccctgcgcgacggacacgacgcggtcgccgacgagatcgcgtcgtcccgcgccgccatcgcgtcccgcaagcgcgacccgcggttacacaatgggcaaatccgggcgcgcatcgaggcgatcgtcgcgtccggagcccaccgcggcaatgccgcccagcgccgcgccagccaagacgcgcgactgcacctgccgccgctgccgaccacgacgatcggctcctacccgcagacctcggcgatccgcgttgcgcgtgcggcgctgcgggccggtgagatcgacgaggccgagtacgtgcgccggatgcggcaagagatcaccgaggtgatcgcgctacaggagcggctcgggctcgacgtgctggtgcacggcgaaccggagcgcaacgacatggtgcagtacttcgccgagcaattggcgggtttcttcgctacccagaacggctgggtgcagtcctacggcagccgctgtgtgcgtccgccgatcctgtacggcgacgtgtcccggccgcgggcgatgacggtcgagtggatcacctacgcgcagtcgctgaccgacaaaccggtgaagggcatgttgaccgggccggtgacgattctggcgtggtcgttcgtgcgtgacgaccagccgttggccgataccgccaaccaggtggcgctggcgattcgcgacgagaccgtggatttgcagtccgccggcatcgcggtcatccaggtcgacgagcctgcgctgcgtgaactgctgccgctgcgtcgcgccgaccaggccgagtacttgcgttgggcggtaggggctttccggttggccacctccggcgtctcggacgccacccagatccacacgcatctgtgctactcggagttcggcgaggtgatcggcgcgatcgccgatctggacgcggacgtcacgtccatcgaggcggcccggtcacacatggaggtgctcgacgacctgaacgcgatcggcttcgccaacggtgtgggcccgggcgtctatgacattcactcgccacgggtgccctccgctgaggagatggccgactcgttgcgggccgcgttgcgcgcggtgccggccgagcggctgtgggtcaaccccgactgcggactgaagacccgcaatgtcgacgaggtgaccgcgtcgctgcacaacatggtcgccgccgcccgggaggtgcgcgcgggctag

SEQ ID NO: 147 - DNA, 2283 bp, Mycobacterium leprae
atggacgaactcgtgaccactcaatcattcaccgcaaccgtaactggctctccacgcattggcccgcgccgcgaacttaaacgggcgaccgaaggctattgggccaagcgtaccagccgatcagaactggagtccgtcgcctcaacattgcgccgcgacatgtggtcggacttagccgccgccggcctggactccgtaccggtgaacaccttctcttactacgaccagatgctcgacacggcattcatgctcggcgcgctgcctgcccgggtagcacaagtgtccgacgacctagatcagtacttcgccctcgcacgcggcaacaacgacatcaagccgctggagatgactaagtggttcgacaccaactaccactacctggttcctgaaatcgagcccgcgaccaccttctcactgaacccaggcaagatactcggtgagctgaaagaagcacttgagcaaagaattccgtcccgaccggtcattatcggtccggtcaccttcctgttactgagcaagggcatcaatggcgggggcgcaccgatacagcggctcgaggagctggtgggaatctactgcacgctgctatcactgctcgccgagaatggcgcacgatgggtacagttcgacgagccggcgctggtgactgatctatcccccgatgcaccggcgttggcggaagcagtttacactgcactcggctcagttagcaaacgacccgccatttacgtggccacttacttcggtaaccccggcgcttccttggcggggctagcccgcacgcccatcgaggcgatcggtgtcgacttcgtttgtggtgccgacacgtcggtcgcggcggtgcccgagctggccggcaagactctggtggctggcatcgtcgacggacgcaacatctggcgcactgacctggaatcggcgttgagcaagttggctactctgctgggttcagcagccaccgttgctgtttcgacgtcgtgctctacgctgcatgtgccgtattcgttggaaccagaaaccgacctggacgacaatttgcgcagctggctggcgttcggtgcggaaaaggtggccgaagtcgttgtgctggcacgcgcacttcgcgacgggcgcgacgcggtcgccgatgagatcgcggcgtccaatgccgccgttgcctcgcgacgcagcgacccgcggctgcacaacgggcaggtacgcgcgcgtattgactcgattgtcgcttccggtacgcaccgcggtgacgcagcgcagcgccgcaccagccaggacgcgcgcctacacttaccgccgctgccgaccacgacgatcggctcctacccgcagacctcagcgatccgcaaagcgcgagcggcactgcaggacgctgagatcgacgaggccgagtacatcagcaggatgaaaaaagaagtcgccgacgccatcaaactgcaggagcaactcgggctagatgtactggtccatggcgagccggagcgcaacgacatggtacagtatttcgctgagcaactgggcggcttcttcgccacgcagaacggttgggtgcagtcctacggcagccgttgtgtacgtccgccgatcctctacggtgacgtgtcccggcctcacccgatgacaatcgagtggatcacctacgcgcagtccctaactgacaagccagttaagggcatgttgaccggaccggtcacgatcttagcctggtcgtttgttcgtgacgaccagccgctggccgataccgcgaaccaagtagcactggcgattcgcgatgagaccgtagatctacaatccgccggtatcgcaatcatccaggttgacgagcccgcgctacgtgagctgctgccgctgcgtagggctgatcaagacgaatacttatgttgggcagtaaaggctttccgcctagctacctcgggggtcgccgactcgacgcaaatccacactcatctgtgctactccgagttcggcgaagtgattggagctatcgccgacctggacgccgacgtcacatccatcgaagcggcgcgctcacacatggaagtattggatgacctgaacgcagtcggcttcgctaacagcataggcccgggagtctacgacatccactcgccgcgggtaccaagcactgacgagattgccaagtcgctacgcgcagcattaaaagccataccgatgcaacggctttgggttaaccccgactgcgggctgaagacccgatcagttgacgaggtgagcgcgtcgctgcagaacatggtcgcagcagcacgccaggtgcgggcaggggcctaa

SEQ ID NO: 148 - DNA, 2319 bp, Streptomyces coelicolor
gtgacagcgaagtccgcagccgcggcagcacgggccaccgtgtacggctacccccgccagggcccgaaccgggaactgaagaaggcgatcgagggctactggaagggccgcgtcagcgcgcccgaactccggtccctcgccgcggacctgcgcgccgcgaactggcgccgactggccgacgccggcatcgacgaggtgcccgccggcgacttctcgtactacgaccacgtcctcgacaccaccgtcatggtcggtgcgatccccgagcgccaccgcgccgccgtcgcggccgacgccctggacggctacttcgccatggcccgcggcacccaggaggtcgcgccgctggagatgaccaagtggttcgacaccaactaccactatctggttccggagttgggtccggacaccgtcttcacggccgactccaccaagcaggtcaccgagctggcggaagccgtcgccctgggcctgaccgcccgccccgtgctggtcggcccggtcacctatctcctgctggccaagccggcccccggcgcccccgcggacttcgagccgctcaccctgctcgaccggctcctgccggtgtacgccgaggtcctcaccgacctgcgcgcggccggcgccgagtgggtccagctggacgagcccgccttcgtgcaggaccgcaccccggcggaactgaacgccctggaacgcgcctaccgggaactcggcgccctgaccgaccggcccaagctgctcgtcgcctcctacttcgaccgcctcggcgacgcgctgcccgtcctggccaaggcaccgatcgagggtcttgccctggacttcaccgacgccgccgcgaccaacctggacgccttggccgccgtcggcggactgcccggcaagcgcctcgtcgccggtgtcgtcaacggccgcaacatctggatcaacgacctgcagaagtcgttgtccacgctcggcacgctgctgggtctcgcggaccgggtcgacgtgtccgcctcctgctccctcctccatgtgcccctcgacaccggggcggagcgggacatcgagccgcagatcctgcgctggctggccttcgcccggcagaagaccgccgagatcgtcaccctcgccaagggcctcgcccagggcaccgacgccatcaccggcgaactcgccgccagccgcgccgacatggcctcccgcgccggctcaccgatcacccgcaacccggccgtacgagcccgtgccgaggccgtgacggacgacgacgcccgtcgctcccagccgtacgccgaacggaccgccgcccagcgggcacacctggggctgccgccgctgccgaccacgaccatcggctcgttcccgcagaccggcgagatccgggccgcccgtgccgacctgcgcgacggccgcatcgacatcgccggctacgaggaacggatccgggccgagatccaggaggtgatctccttccaggagaagaccggcctggacgtcctggtgcacggcgagcccgaacgcaacgacatggtccagtacttcgccgaacagctgaccgggtatctggccacgcagcacggctgggtccagtcctacggcacccgctacgtccgcccgccgatcctggccggggacatctcccgccccgagccgatgacggtgcgctggacgacgtacgcccagtcgctcaccgagaagccggtcaagggcatgctcaccggcccggtgaccatgctcgcatggtccttcgtccgcgacgaccagcccctcggtgacaccgcccgccaggtcgccctcgccctgcgcgacgaggtgaacgacctggaggcggccgggacctcggtcatccaggtcgacgaacccgccctgcgcgagacactgccgctgcgggccgccgaccacaccgcctacctggcctgggcgacggaggcgttccggctgaccacctctggcgtccgcccggacacccagatccacacccacatgtgctacgccgagttcggcgacatcgtccaggccatcgacgacctcgacgccgacgtcatcagcctggaagccgctcgctcacacatgcaggtagcccacgaactcgctacccacggctacccgcgcgaagccggacccggcgtgtacgacatccactccccgcgcgtcccgagcgccgaggaagccgccgcactgctgcgcaccggcctcaaggcgattcctgccgaacggctgtgggtcaaccccgactgcggtctgaagacccgcggctggcccgagacccgcgcctccctggagaacctggtcgccaccgcccgcaccctccgcggagagctgtccgcttcctga

SEQ ID NO: 149 - DNA, 1263 bp, Streptomyces coelicolor
atgtcgcttctgaacacacccctgcacgagctggacccggacgtcgccgccgccgtcgacgccgagctggaccgccagcagtccaccctcgagatgatcgcgtcggagaacttcgccccggtcgcggtcatggaggcccagggctcggtcctcaccaacaagtacgccgagggctaccccggccgccgctactacggcggctgcgagcacgtcgacgtggtcgagcagatcgccatcgaccgggtcaaggcgctcttcggcgccgagcacgccaacgtgcagccgcactcgggcgcccaggccaacgcggccgcgatgttcgcgctgctcaagcccggcgacacgatcatgggtctgaacctcgcgcacggcgggcacctgacccacggcatgaagatcaacttctccggcaagctctacaacgtggtcccctaccacgtcggcgacgacggccaggtcgacatggccgaggtggagcgcctggccaaggagaccaagccgaagctgatcgtggcgggctggtcggcctacccgcgtcagctggacttcgccgcgttccgcaaggtcgcggacgaggtcggcgcgtacctgatggtcgacatggcgcacttcgccggtctggtcgcggcgggcctgcacccgaacccggtcccgcacgcccacgtcgtcaccacgaccacccacaagacgctgggcggtccgcgcggcggtgtgatcctctccacggccgagctggccaagaagatcaactccgccgtcttccccggtcagcagggtggcccgctggagcacgtggtggccgccaaggccgtcgccttcaaggtcgccgcgagcgaggacttcaaggagcgccagggccgtacgctggagggtgcccgcatcctggccgagcgcctggtgcgggacgacgcgaaggccgcgggcgtctccgtcctgaccggcggcacggacgtccacctggtcctggtggacctgcgcgactccgagctggacggacagcaggccgaggaccgcctccacgaggtcggcatcacggtcaaccgcaacgccgtcccgaacgacccgcgcccgccgatggtgacctccggtctgcgcatcggtacgccggccctggcgacccgcggcttcaccgccgaggacttcgccgaggtcgcggacgtgatcgccgaggcgctgaagccgtcctacgacgcggaggccctcaaggcccgggtgaagaccctggccgacaagcacccgctgtacccgggtctgaacaagtag

SEQ ID NO: 150 - DNA, 1290 bp, Thermobifida fusca
gtgaaggttaggaaactcatgaccgcccagagcacttcgctcacccagtcgctggctcagctcgaccctgaggtcgcggcagccgtggacgccgagctcgcccgccagcgcgacaccttggagatgatcgcctccgaaaactttgcgccccgggcggtgctggaggcgcaaggcacggtgctgaccaacaagtacgcggaaggctacccgggccgccgctactacggcgggtgtgagcacgtggacgtcatcgaacagctggccatcgaccgtgccaaggccctgttcggtgccgagcacgccaacgtgcagccgcactcgggcgctcaggcgaacaccgccgtgtactttgcgctgctgcagccgggcgacaccatcctgggcctggacctcgcacacggcgggcacctcacccacggcatgcggatcaactactccggcaagatcctcaacgccgtggcctaccacgtacgcgagtccgacggcctgatcgactacgacgaggtcgaagcgctagccaaggagcaccagccgaaactgatcatcgcgggctggtcggcgtacccgcgccagttggactttgcccggttccgggagatcgccgaccagacaggcgccctcctcatggtggatatggcgcatttcgcgggtctggtcgcggctggactgcaccccaacccggtcccctacgccgacgtagtgaccaccaccacccacaagaccttgggcgggccgcgaggcgggctcatcctggccaaggaggagctgggcaagaagatcaactcggcggtgttcccggggatgcagggcggtccgctccagcacgtcatcgctgccaaggccgtagcgttgaaggtcgcggccagcgaagagttcgctgagcggcagcggcgcaccctttccggcgcgaagatcctcgccgagcggctcacccagcctgacgcggccgaggccggtattcgggtgctgaccggcggcaccgacgtccacctggtcctggtcgacctggtcaactcggaactcaacggcaaagaggcggaggaccggctgcacgagatcggtatcacggtcaaccgcaacgcggtccccaacgacccgcggccgcccatggtcacgtcgggactgcggatcggcaccccggctctcgccacccgcggtttcggcgacgccgacttcgctgaggtcgccgacatcatcgctgaggcgctcaagccgggcttcgacgcggcgaccctgcgctcccgcgtccaggcgctggccgccaagcacccgctctaccctggactgtga

SEQ ID NO: 151 - DNA, 1281 bp, Mycobacterium tuberculosis
atgtctgccccgctcgctgaggttgaccccgatatcgccgagttgctggccaaggagcttggtcggcaacgagacaccctggagatgatcgcctcggagaacttcgcaccgcgcgctgtgctgcaggcccagggcagtgtgctgaccaacaagtacgccgagggactgcccgggcggcgctactacggcggttgtgagcacgtcgacgtggtggaaaacctcgcccgcgaccgagccaaggcgttgttcggtgccgaattcgccaatgtgcaaccgcattcgggcgctcaggccaacgccgcggtgctgcatgcgctgatgtcacccggcgagcggctgttgggtctggacctggccaacggtggtcacctgacccatggcatgcggctgaacttctccggcaagctctacgagaatggcttctacggcgtcgacccggcgacacatctgatcgacatggatgcggtgcgggccaccgcactcgaattccgcccgaaggtgatcatcgccggctggtcggcctacccgcgggtgctcgacttcgcggcgttccggtcgatcgccgacgaggtcggggccaagttgctcgtggacatggcgcatttcgcgggtctggtcgccgcggggttgcacccgtcgccggtgccgcacgcggatgtggtgtccaccaccgtgcacaagacgctcggcggcggccgctccggcctgatcgtcggtaagcagcagtacgccaaggcgatcaactcggcggtgtttcccgggcagcagggcggtccgctcatgcacgtcattgccggcaaggcggtcgcgttgaagatcgccgccacacccgaatttgccgaccggcagcggcgcacgctgtccggggcccggatcattgccgatcgactgatggctcccgatgtcgccaaggccggtgtgtcggtggtcagcggcggcaccgacgtccacctggtgctggtcgatctgcgtgattccccactggatggccaggccgccgaggacctgctgcacgaggtcggcatcacggtcaaccgcaacgccgtccccaatgatccccgaccgccgatggtgacctcgggcctgcggataggcacgcccgcgctggcgacccgcggcttcggcgacaccgagttcaccgaggtcgccgacattattgcgaccgcgctggcgaccggcagttccgttgatgtgtcggcgcttaaggatcgggcgacccggctggccagggcgtttccgctctacgacgggctcgaggagtggagtctggtcggccgctga

SEQ ID NO: 152 - DNA, 1281 bp, Mycobacterium leprae
atggtcgcgccgctggctgaagtcgacccggatatcgccgagctactgggcaaagagctaggccggcaacgggacaccttggagatgatcgcttcagagaactttgtgccgcgctcggttctacaggcccaaggcagcgtgctgaccaacaagtacgctgaggggttgcccggccgacgctattacgacggctgcgagcacgtcgacgtcgtggagaacatcgcccgcgaccgggccaaggcgctgttcggtgccgacttcgccaacgtgcagccgcactcgggggcccaggccaacgccgcggtactgcacgcgctgatgtctccgggggagcggctgctgggtctggatctcgccaatggcggtcatctgacgcatggcatgcggctgaacttctccggcaagctgtatgaaaccggcttttatggcgtcgacgcgacaacgcatctcatcgatatggacgcggtgcgggccaaggcgctcgaattccgcccgaaggtgctgatcgctggctggtcggcctatccgcggattctggacttcgctgcttttcggtcgatcgcagacgaagtcggcgccaagctgtgggtcgacatggcgcatttcgcgggcctggttgcggtggggttgcacccgtctccagtgccgcatgcagatgtggtgtccacgaccgttcacaagactcttggcgggggccgttccggtttgatcctgggcaagcaggagttcgccacggccatcaactcagcggtgtttcctggccagcagggtggaccgcttatgcatgtcatcgcgggcaaggcggtcgcgctgaagattgctaccacgcctgagttcaccgaccggcagcagcgcacgctggccggcgcccggattctcgccgatcggcttaccgccgctgatgtcaccaaggccggggtgtcggtggtcagtggtggcactgacgtccacctagtgctggtcgacctgcgcaactccccgttcgacggccaggcagcagaagatctgctgcacgaggtcggcatcactgtcaaccgcaacgtggttcccaatgacccccggccgccgatggtgacctcaggcctgcggataggaacccccgcgctggcaacccgagggttcggtgaagcggagttcaccgaggtcgcggacatcatcgcgacggtgctgaccactggtggcagtgtcgatgtggccgcgctgcggcagcaggttacccgacttgccagggacttcccgctctacgggggacttgaggactggagcttggccggtcgctag

SEQ ID NO: 153 - DNA, 1239 bp, Lactobacillus plantarum
atgaattaccaggaacaagatccagaagtatgggctgcgattagtaaggaacaggcacggcaacaacataatattgagttgattgcttctgagaacatcgtttcaaagggcgtccgggcagcgcaggggagtgtgctgaccaataaatactctgaaggctatccgggtcaccgcttttacggtggtaacgaatacattgaccaagtggaaaccttagcaattgaacgggctaagaaattatttggtgcggaatatgctaatgtgcaaccacactctggttcccaagccaatgcggctgcatatatggcactgattcaacctggtgaccgggtgatggggatgtcactagatgctgggggacacttaacacatggatctagtgtgaacttctctggtaaactttacgattttcaaggttatgggctcgatcctgaaaccgcagaattaaactatgatgcaattcttgcacaagcacaagattttcaaccaaagttaatcgttgcgggggcttctgcttatagtcgattgattgatttcaagaagtttcgcgagattgcagatcaagttggggccttattgatggttgatatggctcatattgccggcttagttgcggccgggctacatcctaatccagtgccatatgctgatgtggttacgacaacgacgcacaaaacgttacgggggccccgtggcggtatgattttagcgaaagaaaagtatggcaagaagatcaactcagccgttttccctggcaatcagggtgggccgttggatcacgtaattgcgggtaaagcgattgctttgggcgaagacttacagcctgagtttaaggtttatgcccaacatatcattgataatgccaaggcaatggcgaaggtcttcaatgactctgacttggttcgggttatttctggtggcacggacaatcatttaatgacgattgatgtcactaagtctggtttgaacggtcgccaagtacaagatctgttagatacggtttatattacggtcaacaaagaagcgattccgaatgagacgttaggggctttcaagacctctggtattcggttgggaacacctgcgattacgacccgtggttttgacgaagctgatgcaactaaggtcgctgaattgattttgcaagcgttacaagcaccgacagatcaagcaaatctagatgacgttaaacagcaagcaatggctttaacagcgaagcacccgatcgatgttgattaa

SEQ ID NO: 154 - DNA, 1167 bp, Thermobifida fusca
atggcttcgagggcggccagcaccggttcccactccgcgccgatctccagcagcagcgggcgtcggctcgcgacgaaggccgccagttcggcatcgacaagggggcgcacgaaggcgacgggagacaagtgcgaggagctcataagggcaggctaccgattgttccgccgcccgtcttcaccacgacacacccaaaccccaccgatatggtcgattacagtgggagacatgctcggatcacccacgccgcgcccggcgcctcgtccgcgccgtatcagcgaactgttggcgcgtaaagagcccacgttctccttcgagttcttccccccgaaaacgcccgagggggagcgcatgctttggcgggcgatccgggagatcgaggccctacgcccttccttcgtctcggtgacctacggtgcgggcggcagcacccgggaccggaccgtgaacgtcaccgagaagatcgccaccaacaccactctgctgcccgtggcgcacatcaccgcggtcaaccactcggtgcgggagctccgccacctcatcggccggttcgcggcggcgggggtgtgcaacatgctcgcgctgcgcggcgacccgcccggcgacccgctgggcgaatgggtcaagcacccggagggcctcacccacgccgaagaactggtgcggctgatcaaggagagcggtgacttctgcgtcggggtggccgcattcccctacaagcacccccgctcccccgacgtggagaccgacacggacttcttcgtccgcaaatgccgggcaggagcggactacgcgatcacccagatgttcttcgaagccgaggactacctgcggctgcgggaccgggtcgcggcccggggctgcgacgtgcccatcatccctgagatcatgccggtcacgaagttcagcacgatcgcccgctccgagcagttgtcgggagcgccgttcccccgcaggctggcggaagagttcgaacgggtcgccgacgaccccgaggcggtgcgcgcgctcggtatcgagcacgccactcggctgtgcgaacggctcctcgccgaaggggcgccgggcatccacttcatcacgttcaaccgttcgacggcgacccgcgaggtctaccaccggctcgtgggcgccacccagccggcagcggtagctgcgctgccatga

SEQ ID NO: 155 - DNA, 924 bp, Streptomyces coelicolor
atggccctcggaaccgcaagcacgaggacggatcgcgcccgcacggtgcgtgacatcctcgccaccggcaagacgacgtactcgttcgagttctcggcgccgaagacgcccaagggcgagaggaacctctggagcgcgctgcggcgggtcgaggccgtggccccggacttcgtctccgtgacctacggcgccggcggctccacgcgcgccggcacggtccgcgagacccagcagatcgtcgccgacaccacgctgaccccggtggcccacctcaccgccgtcgaccactccgtcgccgagctgcgcaacatcatcggccagtacgccgacgccgggatccgcaacatgctggccgtgcgcggcgacccgcccggcgacccgaacgccgactggatcgcgcaccccgagggcctgacctacgcggccgaactggtcaggctcatcaaggagtcgggcgacttctgcgtcggcgtcgcggccttccccgagatgcacccgcgctccgccgactgggacacggacgtcacgaacttcgtcgacaagtgccgggccggcgccgactacgccatcacccagatgttcttccagcccgactcctatctccggctgcgcgaccgggtcgccgcggccggctgcgcgaccccggtcatccccgaggtcatgccggtgaccagtgtgaagatgctggagaggttgccgaagctcagcaacgcctcgttcccggcggagttgaaagagcggatcctcacagccaaggacgatccggcggctgtacgctcgatcggcatcgagttcgccacggagttctgcgcgcggctgctggccgagggagtgccaggactgcacttcatcacgctcaacaactccacggcgacgctggaaatctacgagaacctgggcctgcaccacccaccgcgggcctag

SEQ ID NO: 156 - DNA, 690 bp, Mycobacterium tuberculosis
atgctgacggccatgcggggcgacatccgagcagcccgggagcgggatccggcggcccctaccgcgctggaagtcatcttctgctacccgggcgtgcacgccgtgtggggccaccgcctcgcccactggctgtggcagcgtggcgccaggctgctcgcgcgggcagctgccgaattcactcgcatcctgaccggtgtagatatccaccccggtgccgtcatcggtgctcgcgtgttcatcgaccacgcgaccggcgtggtgatcggagaaaccgcggaggtcggcgacgacgtcacgatctatcacggcgtcactctcggcggcagtggcatggttggcgggaaacgccatcccaccgtcggtgaccgcgtgatcatcggcgccggggccaaggtcctcggtccgatcaagatcggcgaggacagccggatcggcgccaatgccgtcgtggtcaagcccgtcccgccgagcgcggtggtggtcggggtgcccgggcaggtcatcggccaaagccagcccagtcccggcggcccgtttgattggaggctgcccgatctcgtgggagccagcctcgattcgctgctcaccagggtggccaggctggacgccctcggcggcggcccgcaagcagcaggagtcatccggccacccgaagccgggatatggcacggcgaggacttctcgatctga

SEQ ID NO: 157 - DNA, 684 bp, Mycobacterium leprae
atgtttgcggcaatccggcgtgatatccaggcagcaagacagcgagatccggcacagcccacggtgctggaggtcatctgctgctacccaggcgtgcacgccgtctggggtcatcgaatcagtcactggttgtggaatcgtcgcgccagactggccgcgcgggcgttcgccgaactcacccgcatcctgactggggtcgacatccaccccggtgccgtgctcggagccggcctgttcatcgatcacgcgaccggcgtggtgatcggggaaaccgcggaagtgggcgatgacgtcaccatcttccatggagtcactctcggcggcaccggccgggaaacgggtaaacgtcacccaaccatcggggatcgagtaaccatcggcgccggcgccaaggtcctcggtgccatcaagatcggcgaggacagccggattggcgccaacgcagtcgtggtcaaggaggtcccagccagcgctgtggccgtcggggttcccggacaaatcatcagcagcgacagcccggccaacggggacgattctgtgctgcccgacttcgtgggcgtcagcctgcaatccctgctcaccagggtggccaagctggaagccgaagacggcggttcgcaaacctaccgcgtcatccggctacccgaagccggggtttggcacggcgaggacttctcaatctga

SEQ ID NO: 158 - DNA, 543 bp, Lactobacillus plantarum
gtgtttcagacggctcgtgccattctcaatcgtgaccccgccgcgatcaatttgcggacagttatgttgacctatcctggtattcacgcgctcgcctggtaccgggttgcccattattttgaaacacaccgtttaccattattggccgccttgctgagccaacatgcggcccggcataccgggattctgattcacccggccgcgcaaattggtcaccgggtcttctttgaccatggtattggtactgtcattggtgcaacggcggtcattgaagacgacgttacaattttacacggcgtcactttaggcgcacgtaaaaccgaacaagctgggcgccggcatccctatgtttgtcgcggtgctttcattggtgcccacgcccaactcttgggccctattacgattggcgccaacagtaaaattggtgctggtgcgattgttttagacagcgttcccgcccacgttactgcggtcggtaacccggcccatctagttgccactcaattgcatgcttatcatgaagcaaccagcaatcaagcttga

SEQ ID NO: 159 - DNA, 1587 bp, Mycobacterium tuberculosis
gtgagcctgcctgttgtgttgatcgccgacaaacttgccccatcaacggttgccgccttgggagatcaggtcgaggtgcgctgggttgacggtccggaccgagacaagctgctggccgcggtgcccgaagcggacgcgctgctggtgcgatcggccaccacggttgacgccgaggtgctggccgccgcccccaagctcaagatcgtcgcgcgcgccggcgtcgggctggacaacgtcgacgtggacgccgcgacggcccgcggcgtgctggtggtcaacgccccgacgtcgaacatccacagcgccgcggagcatgcgctggcgctgctgctggccgcctcacgccagattccggcggccgacgcgtcgctgcgcgagcacacctggaagcgttcgtcgttttccggtaccgagatcttcggcaaaaccgtcggcgtggtgggtctgggccgcatcgggcagttggtcgcccagcggatcgctgcgttcggcgcttacgtcgtcgcctatgacccgtacgtttcgccggcccgtgcggcgcagctgggcatcgaactgctgtccctggacgacctgctggcccgcgccgatttcatctcggtgcacctaccgaaaacaccggagacggcgggactgatcgacaaggaggcgctggcgaagaccaagccgggcgtcatcatcgtcaacgccgcgcgcggcggcctggtggacgaggcggcactggccgacgcgatcaccggcggccacgtgcgggcggccggtctggacgtgttcgccaccgaaccgtgcaccgacagcccgctgttcgagctggcacaggtggtggtcacaccgcatctgggtgcgtccaccgcggaggcgcaggaccgggcgggcaccgacgtcgccgagagcgtgcggctggccctggcaggggaattcgtgcccgacgcggtcaacgtcggcggcggagtggtcaacgaggaggtggcgccctggctggatctggtgcgtaagctcggcgtgctggcgggtgtgttgtccgacgaactgccggtgtcgttgtcggtgcaggtgcgcggtgagctggccgccgaagaggttgaggtgctgcgcctttcggcgctgcgcggcctgttctcggcggtgatcgaggatgcggtgacatttgtcaacgcaccggcattggccgccgaacgtggcgtcaccgccgagatctgtaaggcctcggaaagccccaaccaccgcagcgtcgtcgacgttcgcgcggtcggcgcggacggttcggtggtgaccgtctcgggcacgctgtatggcccacagctgtcgcagaagatcgtgcagatcaacggccgccactttgatctgcgcgcccaggggatcaacctgatcatccactacgtcgaccggccgggagcgctgggcaagatcggcacgttgctggggacggccggggtgaatatccaggccgcgcagctctccgaagacgccgaaggcccgggcgcgacgattctgctgcggctggaccaagacgtgcccgacgacgtgcggacggcgatcgcggcggcggtggacgcctacaagctcgaggttgtcgatctgtcgtga

SEQ ID NO: 160 - DNA, 1587 bp, Mycobacterium leprae
gtggacctgcctgttgtgttaattgccgacaaactcgcccaatcaaccgtggctgccctgggagaccaagtcgaggtgcggtgggtggacggtccagaccggacgaagctgttagctgcagtacccgaggccgacgcgttgttggtgcggtcggccactactgtcgacgccgaggtgctggcagccgctcctaagctcaagatcgtcgcccgtgccggggtagggctagacaacgttgatgtcgatgccgccaccgcgcgcggtgtcctggtagtcaacgccccaacgtcgaacattcacagcgccgctgagcacgcgttggcgctgctattggcagcttctcggcagatcgcggaggccgacgcctcactgcgtgcacacatctggaaacggtcgtcgttctccggcaccgaaattttcggcaagaccgtcggcgtggtggggctgggtcggattgggcagttggttgccgcacggatagcagcgttcggggctcacgttatcgcttacgacccgtatgtggcgccggcacgggccgcgcagcttggtatcgagctgatgtcttttgacgatctcctagcccgggccgattttatctcagtgcatttgccgaagacgcccgagacggcgggcctgatcgacaaggaggcgctggccaaaaccaagcccggtgtcatcattgtcaatgccgcacgcggcggcttagtggacgaggtggcgctagccgatgcggtgcgcagcggacatgttcgggcggccggtctagatgtgtttgccaccgaaccgtgcaccgatagcccgctgtttgaactatcgcaggtggtggtgacaccgcatctgggggcgtctaccgccgaagcccaggatcgagcaggtactgatgtggccgaaagcgtgcggctggcgctggcgggggagtttgtgcctgacgcggtcaacgtggacgggggcgtggtcaacgaagaggtggctccctggctggacttggtgtgcaagcttggggtgctggtagccgcgttatccgatgaactgccggcgtcgttgtcggtgcacgtgcgtggcgagttggcttctgaagacgttgaaatattgcggctttcggccctacgtgggcttttctcgacggtcatagaggatgctgtgacgttcgtcaacgcaccggcactggccgccgaacgaggtgtgtccgctgaaatcactacgggctcggagagccccaaccatcgcagtgtggtcgacgtgcgggcggtcgcctccgacggctcggtggtcaacatagccggtacgttgtctgggccgcaactggtgcagaagatcgtgcaggtcaatggtcgtaactttgatttgcgtgcgcagggcatgaacttggtgatcaggtatgtcgaccaacctggcgctctgggcaagattggcactttgctgggcgcggccggggtgaatatccaagctgctcagctgtctgaggacaccgaggggccaggtgcgacgattctgttgaggctggatcaagacgtgccgggtgatgtgcggtcggcgatcgtggcagcggtgagtgccaacaagcttgaggtagtcaatctgtcatga

SEQ ID NO: 161 - DNA, 1638 bp, Thermobifida fusca
gtggctgcgaccgcagtcgaacccacacgcactccctctaaggaattcgttgtgcccaagccagtcgtcctggtcgcggaagaactttcgcccgcaggaatcgcgctgttggaagaggactttgaagtccgccacgtcaacggcgccgaccgttcccagctccttcccgcgctcgccggagtcgacgcgctgatcgtgcgcagcgccaccaaagtggacgctgaggtgctggccgcggcgccctccctcaaggttgtggcgcgtgcgggcgtcggactggacaacgtggatgtcgaggccgccaccaaggcgggcgtgctcgtcgtcaacgcgcccacctccaacatcatcagtgcagcggaacaggccatcaacctgctcttggccacggcccgcaacactgctgctgcccacgcggccctcgtgcgcggcgagtggaagcgttccaagtacaccggcgtcgaactgtacgacaaaaccgtcggcatcgtgggcctgggacggatcggcgtgctcgtcgcccagcggctccaggcgttcggcaccaagctgatcgcctacgaccccttcgtgcagcctgcccgggccgcgcagctgggggtggagctcgtcgagctcgacgagctgctggagcgcagcgacttcatcacgatccacctgcccaagacgaaggacacgatcggcctgatcggcgaggaagagctgcgcaaggtcaagccgacggtccggatcatcaacgctgcgcgcggcgggatcgtggacgagacggccctctaccacgcgctcaaggaaggtcgtgtggccggcgctgggctggacgtgttcgccaaggagccttgcacggacagcccgctgttcgagctggagaacgtggtggtggctccgcacctgggggccagcacgcacgaggcgcaggagaaggccgggacccaggtggcccggtccgtcaagcttgcgctcgccggcgagttcgtgccggacgcggtcaacatccagggcaagggcgtggccgaggacatcaagccggggctgccgctgacggagaagctcggccgtatcctcgccgcgctcgccgacggtgcgatcacccgggtcgaggtggaggtccggggcgagatcgtcgcccacgacgtcaaggtgatcgagctggccgcgctcaagggcctcttcacggacatcgtggaagaggctgtgacctacgtgaacgcgcctctggtagccaaggagcgcggtatcgaggtgagcctgaccaccgaggaggagagccccgactggcgcaacgtcatcacggtgcgggccatcctctccgacggccagcgcgtgtcggtctcgggcacgctgaccgggccgcgccagttggagaagcttgtcgaggtcaacggctacaccatggagatcgcgcccagcgagcacatggcgttcttctcctaccacgaccgtcccggtgtggtcggcgtagtcggccaactgctcggacaggcgcaggtgaacatcgccggcatgcaggtcagccgggacaaggagggcggtgcggcgctgatcgcgctgaccgtggactcggcgatccccgacgagaccctcgagacgatctccaaggagatcggcgccgagatcagccgcgtggacttggttgactga

SEQ ID NO: 162 - DNA, 1590 bp, Streptomyces coelicolor
gtgagctcgaaacccgtcgtactcatcgctgaagagctgtcgcccgcgaccgtggacgcactcggccccgacttcgagatccgccactgcaacggcgcggaccgggccgaactgctccccgccatcgccgacgtggacgcgatcctggtccgctccgcgaccaaggtcgacgccgaggccgtggccgccgccaagaagctcaaggtcgtcgcgcgcgccggggtcggcctggacaacgtcgacgtctccgccgccaccaaggccggcgtgatggtggtcaacgccccgacctccaacatcgtcaccgccgccgagctggcctgcggcctgatcgtcgccaccgcccgcaacatcccgcaggccaacgccgcgctgaagaacggcgagtggaagcgcagcaagtacaccggcgtggagctggccgagaagaccctcggcgtcgtcggcctcggccgcatcggcgcgctcgtcgcgcagcgcatgtcggccttcggcatgaaggtcgtcgcctacgacccctacgtgcagcccgcgcgggccgcgcagatgggcgtcaaggtgctgtccctggacgagctgctggaggtctccgacttcatcacggtccacctgcccaagacccccgagaccctcggcctgatcggcgacgaggcgctgcgcaaggtcaagccgagcgtccgcatcgtcaacgccgcgcgcggcggcatcgtcgacgaggaggcgctgtactcggcgctcaaggagggccgcgtcgccggcgccggcctcgacgtgtacgccaaggagccctgcaccgactcgccgctgttcgagttcgaccaggtggtcgccaccccgcacctcggcgcctccaccgacgaggcccaggagaaggccggcatcgccgtcgccaagtcggtccgcctggccctcgccggtgagctggtccccgacgcggtcaacgtccagggcggtgtcatcgccgaggacgtcaagcccggtctgccgctcgccgagcgcctcggccgcatcttcaccgcgctcgcgggtgaggtcgccgtccgcctcgacgtcgaggtctacggcgagatcacccagcacgacgtgaaggtgctggagctgtccgccctcaagggcgtcttcgaggacgtcgtcgacgagacggtgtcgtacgtcaacgccccgctgttcgcccaggagcgcggcgtcgaggtccggctgaccaccagctcggagtccccggagcaccgcaacgtcgtcatcgtgcgcggcaccctctcggacggcgaggaggtgtcggtctccggcacgctggccggcccgaagcacctccagaagatcgtcgccatcggcgagtacgacgtggacctcgccctcgccgaccacatggtcgtcctgcgctacgaggaccgtcccggcgtcgtcggcaccgtcggccggatcatcggcgaggcgggtctcaacatcgccggcatgcaggtcgcccgcgcgacggtcggcggcgaggcgctggccgtcctcaccgtcgacgacacggtgccctccggggttctggcggaggtcgcggcggagatcggcgccacgtccgcccggtccgtcaacctcgtctga

SEQ ID NO: 163 - DNA, 975 bp, Lactobacillus plantarum
atgacaaaagtctttattgctggtcagcttccagcccaagctaatacgttacttttacaaagtcagttagtcattgatacttataccggcgataacctgatcagtcacgcggaactcatccgtcgagtcgctgatgccgactttttgattatcccactctcaactcaagtagatcaagatgtcttagaccacgccccacaccttaaactgattgctaattttggtgctggcactaataacatcgatatcgcggcagcagctaagcgccagattccagtcacgaacacgccaaacgtttcggcggtcgcaaccgctgaatcaacggtcggtttgattatcagcctagcgcatcgtatcgtggaaggcgatcacttaatgcgaactagcggctttaacggttgggcgccactattctttctcggccacaacttacaaggcaagacactcggcatcttaggccttggccaaattggtcaagccgttgccaaacgattacacgcctttgacatgcccatcttatacagccaacaccaccgcctaccgattagccgtgaaacgcaacttggcgcaacctttgtctcccaggatgaacttttacagcgtgccgacatcgtcactttacacctgccgcttaccacacaaacaacccatctaatcgataacgctgcttttagcaaaatgaagtccacggcgctcctcatcaacgccgcacgggggccaattgtcgacgagcaagcacttgtgacggcgctgcaacaacatcaaattgctggcgctgcactcgacgtctacgaacatgaaccgcaagtcacacctggtttggccacgatgaacaacgtcattttgacacctcatcttggcaacgcaacggtcgaagctcgcgatggcatggctaccattgtcgcggagaatgtgattgcgatggcccaacatcagccaatcaagtacgtggttaacgacgtaacaccagcatag

SEQ ID NO: 164 - DNA, 600 bp, Mycobacterium tuberculosis
gtgaactcaccactggtcgtcggcttcctggcctgcttcacgctgatcgccgcgattggcgcgcagaacgcattcgtgctgcggcagggaatccagcgtgagcacgtgctgccggtggtggcgctgtgcacggtgtccgacatcgtgctgatcgccgccggtatcgcggggttcggcgcattgatcggcgcacatccgcgtgcgctcaatgtcgtcaagtttggcggcgccgccttcctaatcggctacgggctacttgcggcccggcgggcgtggcgacctgttgcgctgatcccatctggcgccacgccggttcgcttagccgaggtcctggtgacctgtgcggcattcacgttcctcaacccacacgtctacctcgacaccgtcgtgttgctaggcgcgctggccaacgagcacagcgaccagcgctggctgttcggcctcggcgcggtcacagccagtgcggtatggttcgccaccctcgggttcggagccggccggttgcgcgggctgttcaccaaccccggctcgtggagaatcctcgacggcctgatcgcggtcatgatggttgcgctgggaatctcgctgaccgtgacctag

SEQ ID NO: 165 - DNA, 606 bp, Mycobacterium tuberculosis
atgatgacgctcaaggtcgcgatcggcccgcaaaacgcatttgtcctgcgccaaggaattaggcgagaatacgtgctggtcattgtggcgctgtgcgggatcgctgatggggcactgattgccgcgggcgttggcggcttcgctgcgctgattcacgctcatcccaatatgactttggttgcccgatttggcggcgcagcgttcttgattggctacgcgctattggccgcgcggaacgcgtggcgcccgagcgggctggtgccgtcggaatcggggccggctgcgctgatcggcgtggtgcaaatgtgcctggtggtgacctttctcaacccacacgtctatctggacactgtggtgttgatcggtgccctcgccaatgaggaatcagatctgcggtggtttttcggagccggtgcctgggccgccagcgtcgtatggttcgccgtgttgggatttagcgcgggccggctacagccattcttcgcaactccagctgcttggcgcattcttgatgcgctggttgccgtgacgatgattggggtcgccgtcgttgtgctcgtcacgtcaccaagtgtgccgacggccaatgtcgcactgatcatttga

SEQ ID NO: 166 - DNA, 615 bp, Streptomyces coelicolor
atgaacaacgccctcacggcggccgccgccggtttcggcaccggcctctcgctcatcgtcgccatcggcgcccagaacgccttcgtcctgcggcagggggtccgccgtgacgcggtgctcgccgtggtcggcatctgcgcgctgtccgacgccgtgctcatcgccctgggcgtcggcggggtcggcgccgtggtggtggcgtggccgggcgcgctgaccgccgtcggctggatcggcggcgcgttcctgctctgctacggagccctggcggcccggcgggtgttccggccgtccggggcgctgcgggcggacggcgccgccgcgggctcgcgccgccgggccgtgctcacctgcctggcgctgacctggctcaacccgcacgtctacctcgacaccgtgttcctgctgggctccgtcgccgccgaccgggggccgctgcgctggaccttcggcctcggagccgccgccgccagcctggtctggttcgccgcgctcggcttcggcgcccgctacctcggccgcttcctgtcccggcccgtcgcctggcgggtcctcgacggactggtggccgccaccatgatcgtcctcggcgtctccctcgtcgccggggcctga

SEQ ID NO: 167 - DNA, 609 bp, Lactobacillus plantarum
atgcaagtgtttttacaaggattattatttggaattgtttacattgcaccaatcgggatgcaaaacttatttgtggtttcgacagctattgaacaaccattgcaacgggcattgcgggtggctttaattgtaattgcgttcgatacgtcgctctccctggcttgcttttatggggtgggccgattgttgcagaccactccctggctcgaattaggggtgttgttgattgggagtttattggtcttttacattggctggaatctgttgcggaaaaaggccacggcaatggggaccctcgacgcggacttttcatataaagcagcgattctgacagctttttcggtagcatggctgaatccgcaagcactgattgatggttccgtgttgttggcggcgtttcgggtgtcaatcccggcggcactgacccatttctttatgttgggggtcatcctagcatccattatttggttcatcggtctgaccagcttgatcagtaagtttaaacatctcatgcaaccacgagtcctactctggatcaatcgaatctgtggtggcatcattattctatacggcgtgcagttgctagcaaccttcatcacgaaaatatag

SEQ ID NO: 168 - DNA, 1167 bp, Mycobacterium tuberculosis
atgagcgaagaccgcacgggacaccagggaatcagcggaccggccacccgcgccatccacgctggctaccgcccggatccggcgaccggggcggtgaacgtgccgatctacgccagcagcaccttcgcccaagacggcgtcggcggtctgcgtggcggtttcgaatacgcacgcaccggcaaccccacccgggccgcattggaggcctcgctggcggcagtcgaggagggtgctttcgcgcgggcattcagttccgggatggccgcgaccgactgcgccctgcgggcgatgttacggcccggagaccacgtcgtcattcccgatgacgcctacggcggcacattccggttgatagacaaggtgttcacccggtgggatgtccagtacacgccggtgcggcttgccgatctggatgcggtgggtgccgcgattactccgcgcacccggctgatttgggtggagacgcccaccaatccgctactgtcgatcgccgatatcacggccattgccgagctgggcacagacagatcggcaaaagtattggtggacaatacctttgcctcacccgcgttgcagcagccgttgcggctgggcgccgatgtggtgttgcactcgactaccaagtacatcggcggccattccgacgtggtgggaggtgcgctggtcaccaacgacgaagagctggacgaggagttcgctttcttgcagaacggcgccggcgcggtgcccggaccattcgacgcctacctgaccatgcgcggcctgaagaccttggtgctgcggatgcagcggcacagtgaaaatgcctgtgcggtagcggaattcctcgctgatcatccgtcggtgagttctgtgttgtatccgggtttgcccagtcatcccgggcatgagattgccgcgcgacagatgcgcggcttcggcggcatggtttcggtgcggatgcgggccggtcggcgtgcggcgcaggacctgtgtgccaagacccgcgtcttcatcctggccgagtcgctgggtggggtggagtcgctgatcgaacatcccagcgccatgacccatgcgtcgacggccggttcgcaattggaggtgcccgacgatctggtgcggctttcggtcggtatcgaagacattgccgacctgctcggcgatctcgaacaggccctgggttaa

SEQ ID NO: 169 - DNA, 1167 bp, Mycobacterium leprae
atgagcgaagattaccggggacaccacggcattaccggactagccaccaaagccatccatgctggctatcgtccggatccggcaacaggggcagtgaatgtcccgatttatgccagtagtacttttgcccaagatggcgtcggtgagttgcgtggcggattcgaatacgcgcgtaccggcaaccccatgcgcgccgctttagaggcatccttggccacggtcgaagagggcgtttttgcgcgagccttcagttccggaatggctgctagcgactgtgccttgcgggtcatgctgcggccgggggaccacgtgatcatcccggatgacgtctacggcggcaccttccggctgatagacaaggtctttactcaatggaacgttgactacacgccggtaccgctgtctgatttggacgcggtccgcgccgcgatcacatcacggacccggctgatatgggtggaaacaccgaccaatccgctgctgtccatcgcagatatcaccagcatcggcgaactaggcaaaaagcactcagtaaaggtgttggtggacaacacctttgcttcacccgcgctgcaacagccgctgatgctgggggcagacgtcgtgttgcactcgaccacaaagtacatcggcggccactctgatgtggtgggcggcgcgctagtcaccaacgacgaagagctggaccaggctttcggcttcttgcagaacggagccggtgcggtgccgagcccgttcgacgcgtacctaacgatgcgcggattgaagactttagtgctgcggatgcagcggcacaacgaaaatgccattactgtagcggaattcctggctgggcatccgtcggtgagcgccgtgctgtatccgggcttgcccagccatcccgggcatgaggtcgctgcacggcagatgcgcggcttcggcggcatggtttcgttgcggatgcgagccggccgactagccgcccaggatctgtgtgcccgcaccaaggtgtttaccttggctgaatccttgggtggagtggagtcgctgattgagcagcccagtgccatgacgcacgcgtcgacaaccgggtcgcaattggaagtacccgacgacctggtgcggctttcggtcggtattgaagacgtcggcgacctgctgtgcgacctcaagcaggcgttaaactaa

SEQ ID NO: 170 - DNA, 1161 bp, Streptomyces coelicolor
gtgcccatgagcgacaggcacatcagtcagcacttcgagacgctcgcgatccacgcgggcaacaccgccgatcccctgacgggcgcggtcgtcccgccgatctatcaggtgtcgacctacaagcaggacggcgtcggcggattgcgcggcggctacgagtacagccgcagcgccaacccgacccgtaccgcgctggaggagaacctcgccgccctggagggcggccgccgcggcctcgcgttcgcgtccggactggcggccgaggactgcctgttgcgtacgctgctgcgccccggcgaccacgtggtgatcccgaacgacgcgtacggcggcaccttccgcctcttcgccaaggtcgccacccggtggggtgtggagtggtccgtggccgacacgagcgacgccgccgccgtgcgggccgccctcaccccgaagaccaaggcggtgtgggtggagacgccctccaacccgctgctcggcatcaccgacatcgcgcaggtcgcccaggtcgcccgggacgccggcgcccggctcgtcgtcgacaacaccttcgccaccccgtacctccagcagccgctggccctcggcgccgacgtcgtcgtgcactcgctgaccaagtacatgggcgggcactcggacgtcgtgggcggcgcgctgatcgtgggcgaccaggagctgggcgaggagctggcgttccaccagaacgcgatgggcgcggtcgccggacccttcgactcctggctggtgctgcgcggcaccaagaccctcgccgtgcgcatggaccggcacagcgagaacgcgaccaaggtcgccgacatgctctcccggcacgcgcgcgtgacgagcgtgctgtacccggggctgcccgagcacccggggcacgaggtcgccgccaagcagatgaaggcgttcggcggcatggtgtcgttccgcgtcgagggcggcgagcaggccgccgtcgaggtgtgcaaccgcgcgaaggtcttcacgctcggcgagtccctcggcggcgtcgagtcgctgatcgagcacccgggccggatgacgcacgcctccgcggcgggctcggccctggaggtgcccgccgacctggtgcggctgtcggtcggcatcgagaacgccgacgacctgctggccgacctccagcaggcgctgggctag

SEQ ID NO: 171 - DNA, 1146 bp, Thermobifida fusca
atgagttacgaggggtttgagacactggccatccacgccggtcaggaggcagacgccgagaccggggccgtggtggtccccatctaccagacgagcacctaccgccaagacggggtgggcgggctgcgcggcggctacgagtactcccgcaccgccaacccgacccgcacggcactggaagaatgcctggccgcgctggaaggcggggtgcggggcctggcgttcgcttccggcatggccgcagaggacaccctgctccgcaccatcgcccgacccggcgaccacctcatcatccccaacgacgcctacggcggcacgttccgcctcgtctccaaggtcttcgaacggtggggagtgagctgggacgccgtcgacctgtccaacccggaggcggtgcggaccgcaatccgcccggaaaccgtggcgatctgggtggaaacccccaccaacccgctgctcaacattgcggacatcgccgcgctcgcggacatcgcgcacgccgctgacgcgctgctggtggtcgacaacaccttcgcctccccgtacctgcagcggccgctcagcctcggtgcggacgtggtcgtgcactccaccaccaaatacctgggcggccactccgacgtggtcggcggcgccctcgtggtcgccgacgcggaactgggagagcgcctcgccttccaccagaactcgatgggcgcggtcgcgggaccgttcgacgcctggctgaccctgcgcggcatcaaaaccctcggcgtgcgcatggaccggcactgcgccaacgcggaacgcgtcgtggaagcgctcgtcggccacccggaagtcgccgaagtgctctacccgggcctgtccgaccaccccggccacaaggtggcggtcgaccagatgcgcgccttcggtggcatggtgtcgttccgcatgcgcggcggggaggaagccgcgttgcgggtgtgcgcgaaaacgaaagtgttcaccctcgctgaatccttgggcggggtggagtcgctgatcgaacacccggggaagatgacccacgcctccaccgcgggctccctcctggaagtgcccagcgacctggtccggctctccgtgggtatcgaaaccgtcgacgacctcgtcaacgacctgctccaagcattggagccgtag

SEQ ID NO: 172 - DNA, 1146 bp, Lactobacillus plantarum
atgaaatttgaaacccaattaattcacggtggtatcagtgaggatgccactactggcgcgacttcggtacccatctacatggcctcgaccttccgccaaacaaaaatcggtcaaaatcaatacgaatattcacggacgggaaatccaacccgggccgccgtcgaagcattaattgccaccctcgaacatggcagcgctggcttcgcatttgcttctggctccgctgccattaataccgtcttctcactattctcggctggtgatcacattattgtgggaaatgatgtctacggtggcaccttccgcttgatcgacgccgttttgaaacactttggcatgacttttacagccgtagatacgcgtgacttggccgccgttgaagccgcaattacccccacaactaaggcgatttatttggaaacaccgacgaacccgttattacacattacggatattgctgccattgcgaagctcgcgcaagcacacgatttactgagtatcatcgacaacaccttcgcctccccatacgtccagaagcccctggatttaggcgttgacattgttttacacagtgcttccaagtatctcggtggtcacagtgatgttatcggtggcttggttgtcaccaagacgccagcacttggcgaaaaaatcggctacttgcaaaatgccatcggtagtattttggccccgcaagaaagctggctattacaacgtggtatgaagactctggcattgcgcatgcaagcccacctgaataatgccgctaaaatctttacttacttaaagtctcacccagcagttactaagatttactatccaggcgatcctgataatcccgatttttcgattgccaagcaacagatgaatggcttcggcgcaatgatctcgtttgaattacaaccaggaatgaacccccagaccttcgttgaacatttacaagtcatcacgctcgccgaaagtctcggagcattggaaagtttaattgaaattccagccttaatgactcacggtgccatcccacgcacaattcggctacagaatggcatcaaagacgagctgattcgcttatcagtcggtgttgaagccagtgacgatttgttagcagaccttgagcgcgggttcgctagcattcaggcagattaa

SEQ ID NO: 173 - DNA, 636 bp, Streptomyces coelicolor
atggccggcatcggggccttctggtcggtgtccttcctgctggtgctggtcccgggcgcggactgggcctacgcgatcacggcgggactgcgccaccggtcggtgctgcccgccgtcggcggcatgctgagcggatacgtcctgctgaccgccgtggtcgccgcgggcctggcgaccgcggtcgccggttcaccgacggtgctgaccgcgctgacggccgccggtgcggcctatctgatctggctaggcgccacgaccctggcccgccccgcggcgccccgggccgaggagggcgaccagggagacggctccggctcgttggtgggccgtgcggccagaggggcgggcatcagcggcctcaaccccaaggcgctgctgctgttcctcgccctgctgccgcagttcgccgcccgggacgcggactggccctttgccgcgcagatcgtcgccctcggcctggtgcacacggccaactgcgccgtggtctacacgggcgtcggcgccacggcacgccggatcctgggcgcccgcccggccgttgccaccgcggtgtcccgattctcgggcgccgcgatgatcctcgtcggtgccctgttgctggtggagcggctgctcgcccaggggccgacacattag

SEQ ID NO: 174 - DNA, 1737 bp, Streptomyces coelicolor
gtgtcggtaccagggagcgttgcgcaggtgacggaggcggaggagcccaaaccacagtcggacgaggcccgcagtgccttccggcagcccagcgggatcgcggcgtcgatcgacggcgagtcgtcgacgacgtccgagttcgagatcccgcaggggttcgccgtcccgcggcacgccggcaccgagtccgagacgacctcggagttctcgctccccgacggcctggaggtgccgcaggccccgcccgcggacaccgagggctcggcattcaccatgccgagcacgcacagcgcgtggaccgccccgaccgccttcaccccggcgagcggcttcccggcggtgagcctgacggacgtgccctggcaggaccggatgcgcgccatgctgcgcatgccggtggccgagcggcccgcgccggagccctcgcagaagcacgacgacgagaccggccccgccgtgccgcgcgtgttggacctgacgctgcgtatcggggagctgctgctggcgggcggtgagggcgccgaggacgtggaggcggccatgttcgccgtctgccggtcctacggcctggaccgctgcgagccgaacgtcaccttcaccctgctgtcgatctcctaccagccgtccctggtcgaggacccggtgacggcgtcgcggacggtgcgccgccgcggcaccgactacacgcggctcgcggccgtcttccacctggtggacgacctcagcgaccccgacacgaacatctccctggaggaggcctaccggcgtctcgcggagatccgccgcaaccgccacccgtaccccacctgggtgctgacggtggccagcggtctgctcgcgggcggggcctcgctgctcgtcggtggcgggctgaccgtgttcttcgcggcgatgttcggctcgatgctcggcgaccggctggcgtggctgtgcgccgggcgcgggctgccggagttctaccagttcgcggtggccgcgatgccgcccgccgcgatgggtgtcgtgctgacggtgacgcacgtcgacgtgaaggcgtccgcggtcatcaccggtgggctgttcgcgctgctgcccgggcgggcgctggtcgcgggggtgcaggacggtctgaccggcttctacatcaccgccgcggcccgtctgctggaggtcatgtacttcttcgtcagcatcgtcgccggggtgctggtggtgctgtacttcggggtccagctgggcgccgagctcaacccggacgccaagctcggcaccggtgacgaaccgttcgtgcagatcttcgcctcgatgctgctgtcgctggccttcgcgatcctgctccagcaggaacgggccaccgtcctcgcggtgaccctgaacggcggcatcgcctggtgcgtgtacggcgccatgaactacgccggcgacatctctccggtggcctccacggccgccgcggcggggctcgtgggcctgttcgggcagctgatgtccaggtaccggttcgcgtcggccctgccgtacacgacggcggcgatcgggccgctgctgcccggttcggcgacgtacttcggtctgctggggatcgcgcagggcgaggtcgactcggggctgctgtcgctgtccaacgcggtggcgctggcgatggccatcgcgatcggggtgaacctgggcggggagatctcccggctgttcctgaaggtgcccggcgccgcgagtgcggcgggacgccgggcggccaagcggacgcgagggttctag

SEQ ID NO: 175 - DNA, 1590 bp, Mycobacterium tuberculosis
atggatcaagatcgatcggacaacacggcattgcgccgtggtctgcgaattgccctgcgcgggcgccgcgatccgctgcccgtggcgggccggcggagccggacctccggcggaatcggtgacctgcacacccggaaggtgcttgacctgaccatccggctcgccgaggtgatgttgtcgtccggctctggcaccgcggatgtcgtcgccacagcccaggacgtggctcaggcctaccagctcaccgattgcgttgtcgacatcaccgttaccaccatcatcgtgtccgcgctagcgaccacagacactccgccggtcaccatcatgcggtcggtccggacccggtccactgactacagccggctggccgaactcgatcgactcgttcagcggataacctccggtggcgtcgcagtcgaccaggctcacgaggctatggacgagttgaccgaacggccccacccctacccgcgctggctcgcgaccgcgggggcggcgggcttcgcactcggcgtcgccatgttgctcggcggaacctggctgacctgcgtcttggctgccgtgacgtctggcgtgatcgaccgactgggccggctgctgaaccggatcgggaccccgttgttcttccagcgcgtgttcggcgcggggatcgcgaccctggtcgcggtggcggcttacctgatcgccggccaggatccgaccgcgctggtggccaccggaatcgttgtgctgctgtctgggatgaccttggtgggttcgatgcaggacgcggtcaccgggtacatgctcaccgcactcgcccggcttggcgacgccctgttcctgaccgcagggatcgtcgtcggcatcctcatctcgttgcggggcgtcaccaatgccggcatccagatcgaactgcatgtcgacgcaaccacgacgctcgccaccccgggcatgccgctaccgattctcgtcgcggtaagcggtgcggcgctgtccggcgtgtgcctgacgatcgcgagctatgcgccgctacgttctgtggccaccgccggactctcggccggactcgccgaactggtgctcatcggactcggcgcggccgggttcggccgagtggtcgccacctggaccgccgcgatcggcgtcggcttcttggccaccctgatctcaatccgtcggcaggctcccgccttggtgacggccaccgccggcatcatgccgatgctgccgggccttgcggtcttccgtgccgtgttcgcgttcgccgtcaatgacacacccgacggcggtctgacccagctgctggaagcggccgcgactgcactcgcgcttggcagcggggtggtgttgggcgagttcctcgcctcaccattgcggtacggcgccggccggatcggcgacctctttcggatcgagggtccacccgggctccggcgggcggtcggccgtgtggtgcgcctacagccggccaagagccagcagccgaccggcaccggtggccaacggtggcgaagcgtcgcgctggagccgacgacggccgacgacgtggacgccggctatcgcggcgattggcccgctacctgcaccagcgcgaccgaggtgcgctag

SEQ ID NO: 176 - DNA, 1590 bp, Mycobacterium tuberculosis
atggatcaagatcgatcggacaacacggcattgcgccgtggtctgcgaattgccctgcgcgggcgccgcgatccgctgcccgtggcgggccggcggagccggacctccggcggaatcgatgacctgcacacccggaaggtgcttgacctgaccatccggctcgccgaggtgatgttgtcgtccggctctggcaccgcggatgtcgtcgccacagcccaggacgtggctcaggcctaccagctcaccgattgcgttgtcgacatcaccgttaccaccatcatcgtgtccgcgctagcgaccacagacactccgccggtcaccatcatgcggtcggtccggacccggtccactgactacagccggctggccgaactcgatcgactcgttcagcggataacctccggtggcgtcgcagtcgaccaggctcacgaggctatggacgagttgaccgaacggccccacccctacccgcgctggctcgcgaccgcgggggcggcgggcttcgcactcggcgtcgccatgttgctcggcggaacctggctgacctgcgtcttggctgccgtgacgtctggcgtgatcgaccgactgggccggctgctgaaccggatcgggaccccgttgttcttccagcgcgtgttcggcgcggggatcgcgaccctggtcgcggtggcggcttacctgatcgccggccaggatccgaccgcgctggtggccaccggaatcgttgtgctgctgtctgggatgaccttggtgggttcgatgcaggacgcggtcaccgggtacatgctcaccgcactcgcccggcttggcgacgccctgttcctgaccgcagggatcgtcgtcggcatcctcatctcgttgcggggcgtcaccaatgccggcatccagatcgaactgcatgtcgacgcaaccacgacgctcgccaccccgggcatgccgctaccgattctcgtcgcggtaagcggtgcggcgctgtccggcgtgtgcctgacgatcgcgagctatgcgccgctacgttctgtggccaccgccggactctcggccggactcgccgaactggtgctcatcggactcggcgcggccgggttcggccgagtggtcgccacctggaccgccgcgatcggcgtcggcttcttggccaccctgatctcaatccgtcggcaggctcccgccttggtgacggccaccgccggcatcatgccgatgctgccgggccttgcggtcttccgtgccgtgttcgcgttcgccgtcaatgacacacccgacggcggtctgacccagctgctggaagcggccgcgactgcactcgcgcttggcagcggggtggtgttgggcgagttcctcgcctcaccattgcggtacggcgccggccggatcggcgacctctttcggatcgagggtccacccgggctccggcgggcggtcggccgtgtggtgcgcctacagccggccaagagccagcagccgaccggcaccggtggccaacggtggcgaagcgtcgcgctggagccgacgacggccgacgacgtggacgccggctatcgcggcgattggcccgctacctgcaccagcgcgaccgaggtgcgctag

SEQ ID NO: 177 - DNA, 1629 bp, Thermobifida fusca
gtgatctcatacggtccggtggcggatcggtgcagggtgggggcaacttcggcggcgtggggaacgtctcccccaatgagctttccgtttcttccccttgtatcccacccactcccttatgtcccaggtttggatgcgtcattcccggatggagcatgcgtcccgttgggcaggggtccctcccgaggaggtgagcgccggatgaaccaggcaccgcggcgttccgacacatcgcactcccccaccctgctgacccggttgcgggactggcgtgccagccgcggcgtgctcgacctggaagcagaagagttcgaagacgaagcgccgcgtcccgatccgcgggccatggacctcgtcctgcgggtaggggaactgctgctggccagcggggaagccaccgagacggtcagcgacgcgatgctgagtctggcggtggcgttcgaattgccccgcagcgaagtgtcggtgacgttcaccggcatcaccctgtcgtgccaccccggcggggatgagcccccggtgaccggggagcgcgtggtgcgccgccgctccctcgactaccacaaggtcaacgagctgcacgcgctggtggaagacgctgcgttgggcctgctcgacgtggagcgcgcaaccgcgcggctccacgccatcaaacgctcccggccgcactatccccgctgggtgatcgtggccgggctggggctgatcgccagcagcgccagtgtcatggtgggcggtgggatcatcgtggcggccacggcgttcgccgccaccgtgctcggggaccgggccgcgggctggctggctcgacgcggggtggccgagttctaccagatggcggtggccgcgctgttggcggcgagcaccggcatggcgctgctgtgggtgagcgaggagctggagttggggcttcgcgcgaacgcggtgatcaccgggagcattgtggcgctgctaccggggcgtcccctggtctccagcctgcaagacgggatcagcggcgcgtacgtgtcggcggcggcccgcctcttggaggtcttcttcatgttgggggcgatcgtcgcgggggttggcgcggtcgcctataccgcggtgcggctagggctttatgtggacctcgacaatctgccgtcggcggggacgtcactggagccggtcgtgctggcagctgcggcaggtttggcgctcgcgttcgcggtgtccctggtcgcgccggtgcgggccctgctgccgatcggcgcgatgggggtgctgatctgggtgtgctatgcggggctgcgggaactgctcgccgtgccgcctgtggtggggaccggggcgggcgcggtcgtggtcggggtgatcggccactggctggcccggcggacccggcgtcctccgctcaccttcatcattccgtcgatcgctccgctgctgccgggaagcatcctgtaccggggactgatcgagatgagcacgggggagccgctggccggggtggcgagcctcggtgaggcggtcgcggtcggcctggctctgggtgcgggggtgaacctcggtggtgagctggtgcgggccttctcgtggggcggtctcgtgggtgcggggcgccggggtcggcaggcggcccgccggacccggggaggctactag

SEQ ID NO: 178 - DNA, 1344 bp, Lactobacillus plantarum
atgaataaagagcgtaagtcggtgatgccgctatcacaacgacatcatatgacaattccatggaaggactttatccgtaatgaagatgttcccgctaagcatgctagcttacaagagcgaacatcaattgttggtcgagttggtattttaatgttgtcgtgtgggacgggagcgtggcgggttcgtgatgcgatgaataagattgctcgcagcctgaatttaacgtgctcggcagatatcgggttgatttcgattcagtacacgtgttttcatcatgaacgtagttatacgcaagtattatcgataccaaatactggtgtaaatacggataaactaaatattcttgaacagtttgtcaaagactttgatgcgaaatatgcacggttaacggtggcacaagtgcatgcagcaattgatgaagttcagacgcgtcctaaacagtattcgccactggttcttgggttggcagctggcttagcctgtagtggatttatcttcttacttggtggaggtattcccgagatgatttgttcctttttgggcgcgggccttggtaactatgttcgggcgctgatgggtaaacggtcgatgacgacggttgccgggattgcggtcagcgttgcggtagcgtgtttggcttatatggttagttttaagatttttgaatataatttccaaattcttgcccagcatgaggcggggtatattggtgccatgttattcgtgattccgggttttccgttcattacgagtatgttggatatctctaagttggatatgcgctcaggactggagcgcttagcttacgcgattatggttaccctgattgcaactctcgtcggctggctagtcgcgacactggtgagcttcaagccagctgatttcttaccgctaggactttcaccgttagcggtacttttattacgattaccagctagtttttgcggtgtttacgggttctcaataatgtttaatagctcgcaaaaaatggccattaccgcgggatttattggggccattgcgaatacattgcgccttgaactagttgacttgacagcaatgccaccggccgcggccgccttttgtggggcgctcgttgccggcttgatcgcatcggtggttaatcgttataacggctatccccggatttcattgacggtaccttcaatcgtaattatggttccgggattatatatttatcgtgcaatttatagtattggcaataatcaaattggtgtcggttcactatggctgacgaaggccgtgttaatcatcatgtttttaccgctcgggctatttgtagcgcgtgcgttgttggatcacgaatggcgacactttgattaa

SEQ ID NO: 179 - DNA, 990 bp, Thermobifida fusca
atgtcagggggagtcatggccgacatcaccagaaaccggtcctccgggttggcattcgcgatcgcctctgcacttgccttcggcggctccggccccgtggcccggccgctcatcgacgccggactcgaccccctgcacgtcacgtggctccgggtagccggagcagctctactcctgcttcccgtcgctttccgccaccaccgcaccctgcgtacccgccccgcccttctcctcgcctacggcgtcttcccgatggcgggagtccaagccttctacttcgcagccatttcccggatccccgtgggggtggcgctcctcatcgaattcctcggccccgtcctcgtcctgctgtggacccgcctcgtgcggcgcatccccgtgtcccgcgccgcatccctcggcgtggccctggcagtcatcggcctgggctgcctcgtcgaagtctgggcaggcatccgcctggacgcggtcggcctgatcctcgcgctggctgcagcggtctgccaggccacctacttcctgctgtcggacacggcccgcgacgacgtcgaccctctcgctgtcatctcctacggcgcgctcatcgccaccgcactcctgagcctcctcgcccgcccgtggaccctgccgtggggcatcctggcccagaatgtcgggttcggcgggctggacatccccgccctcatcctcctggtgtggcttgccctggtcgccaccaccatcgcctacctcaccggggtggccgcggtacggcggctgtcccctgtcgtcgccgggggagtggcctacctggaggtcgtaacctctatcgtcctggcctggctgctgctcggggaagcgttgagcgtcgcccagcttgtcggggcggccgccgtggtgaccggtgcgttcctcgcccagaccgcggtccccgacaccagtgccgcgcaaggcccggagacgctgcccaccgcccaggacccggccccgcagaccggttccgcccgctga

SEQ ID NO: 180 - DNA, 903 bp, Thermobifida fusca
gtgaatagcgactctcctgggcagtctgcaccgggtccgttctcccgggctgcggcgctcgtccgcgccgcgggcactgccatcccggcgacctggctggtcggggtgagcatcctgtcggtccagttcggcgcaggggtggcgaagaacctgttcgcggtcctccccccaagcaccgtggtgtggctgcgcctgctggcttcggccctggtgctgctgtgcttcgcccctcccccactgcgcgggcactctcgcacggactggctggtcgcggtcggtttcggcacgtcgctggcggtcatgaactacgccatctacgaatcgtttgcgcgcatcccgctgggcgtggccgtgaccatcgaattcctgggcccgctggccgtggccgtggcgggatcgcgccgctggcgggacctggtgtgggtggtgctcgccggcacgggggttgcgctgctgggatgggacgacggcggggtcaccctggcaggggtggcgttcgccgccctcgcgggcgctgcgtgggcgtgctacatcctgctcagcgcagccaccggccgacgcttccccgggacttccggactgacggtggccagtgtgatcggcgcagtgctcgtcgcgccgatgggcctcgcccacagcagcccggccctgctcgacccgagcgtgctgctgaccggtcttgccgtggggctgctctcctcggtcatcccctactccctggaaatgcaggcgttgcgccgcattccgcccggggtgttcggcatcctgatgagcctagaaccggcggcggccgcactcgtgggcctggtcctgctcggggaattcctcaccgtcgcccagtgggccgcggtggcctgcgtggtggtcgccagtgtgggtgcgacccgctccgcccggctgtga

SEQ ID NO: 181 - DNA, 1083 bp, Thermobifida fusca
gtgtggacgctagatcttccgctaaagagaaacgattcatcaactaacggtgcctggacggaaacagagaataggagacacagtggtgggatgatcctctcttttgtctcgttggttcggcatgcccacctgagggtcccagccccgctgctcaccgtcctcagcctggtcctgctgcacatgggcagcgcgggagccgtgcacctgttcgccatcgcgggaccgctcgaagtcacctggctgcggctgagctgggctgcgctcctcctcttcgccgtcggcgggcgccccctgctccgcgcggcacgggccgcaacctggtcggatctcgccgctaccgccgccctcggcgtagtcagcgcggggatgaccctcctgttctccctcgccctcgaccgcatcccgctcggcaccgcagccgcgatcgagttcctcggccccctcaccgtctccgtgctcgccctgcgccgccgccgcgacctgctgtggatcgtcctcgccgtagccggagtgctcctgctcacccgcccgtggcacggggaagccgacctgctcggcatcgccttcggcctaggcggggccgtctgcgtggcgctctacatcgtcttctcccagaccgtcggctcccggctgggcgtcctccccggcctcaccctcgcaatgaccgtgtccgccctggtcaccgccccgctgggtctgccgggggcgatggcggccgccgaccggcacctggtggcagccaccctagggctcgcactgatctaccccctgctgcccctcctgctggagatggtgagcctgcaacggatgaaccgcggcaccttcggcattctcgtctccgtcgaccccgccatcgggctgctcatcggcctgctcctgatcggccaggtccccgtccccctccaagtggcgggcatggccctggtggtcgccgccgggctgggcgccaccagaggcaccagcggacgcacacgcggaggcgcagacccgcacgccaccgacggggagccggaagaccgcaccccggaccgccctgctcccgacgacgccgggcaccacaccaccgaccccgtcacagtgtga

SEQ ID NO: 182 - DNA, 963 bp, Streptomyces coelicolor
atggccgccacccgccccgccgtcatcgcgctcaccgccctcgcccccgtctcctggggcagcacctacgccgtgaccaccgagttcctgccgcccgaccggcccctgttcaccgggctgatgcgggctctgcccgccggcctgctgctgctcgccctcgcccgggtgctgccgcgcggcgcctggtgggggaaggcggcggtgctgggggtgctgaacatcggggccttcttcccgctgctgttcctcgccgcctaccggatgcccggcggaatggccgccgtcgtcggctcggtcggcccgctcctcgtcgtcggcctctcggccctcctgctcgggcagcggcccaccacccggtccgttctcaccggtgtcgccgccgcgtccggcgtcagcctggtggtgctggaggcggccggggcgctggacccgctcggcgtgctggcggccctcgccgccaccgcctccatgtccaccggcaccgtgctcgcggggcgctggggccgccccgaaggcgtcggcccgctcgccctcaccggctggcaactgaccgcgggcggcctgctcctggcaccgctcgccctgctggtcgagggtgccccgcccgccctggacggcccggccgtcggcggctacctctacctggcgctggccaacacggcgctggcgtactggctctggttccgcggcatcggccggctctcggccactcaggtcaccttcctcggaccgctctcgccgctgaccgccgccgtgatcggctgggcggcactcggcgaggcgctcggcccggtgcaactggcggggacggcgctggccttcggagcgaccctcgtgggccagacggtaccgagcgcgccgcgcacgccgccggtcgccgcgggcgccggtccgttcagttctgcttcacgaaacggtcgaaaagattcgatggacctgacgggtgcggccctgcgacggtag

SEQ ID NO: 183 - DNA, 888 bp, Streptomyces coelicolor
atgccggacggcgcgccgggcggacggttcggcgccctcggacccgtcggcctggtcctcgccggtggcatctccgtgcagttcggcgccgcgctggcggtgagtctgatgccgcgggccggggcgctcggcgtggtgaccctgcggctcgccgtggccgccgtcgtcatgctcctggtctgccggccccggctgcgcggccactcccgggccgactggggcacggtcgtcgtcttcggcatcgccatggccggcatgaacggcctcttctaccaggccgtcgaccgcatcccgctcggccccgcggtcaccctggaggtgctcggcccgctcgccctgtccgtcttcgcctcccgccgtgcgatgaacctggtctgggccgcgctcgccctggccggtgtcttcctgctgggcggcggcggcttcgacggcctcgacccggccggtgccgccttcgccctggcggcgggcgccatgtgggcggcgtacatcgtcttcagtgcccgcaccggacgccgcttcccgcaggccgacgggctggcgctggcgatggcggtcggcgcgctgctgttcctgccgctcggcatcgtcgagtcggggtcgaagctgatcgacccggtgacgctcacgctgggcgccggcgtcgccctgctctcctccgtcctgccctacaccctcgaactcctcgcgctgcgccgtctgccagcgccgaccttcgccatcctcatgagcctggagcccgccatcgccgcggcggccggtttcctcatcctcgaccaggcactgaccgccacccagtccgccgccatcgccctggtcatcgcggcgagcatgggagcggtgcggacccaggtggggcggcgccgggcgaaggcgcttcccgagtag

SEQ ID NO: 184 - DNA, 975 bp, Streptomyces coelicolor
atgatgaccaccgcccgcacgtcccctcccgccccctggcaccgtcgtcccgacctgctcgcggccggcgcggccaccgtcaccgtcgtgctgtgggcatccgcgttcgtctccatccgcagcgcgggcgaggcgtactcgccgggcgcgctggcgctcggccggctgctgtcgggcgtcctgacgctcggggcgatctggctgctgcgccgggaggggctgccgccgcgcgcggcctggcgggggatcgcgatatcggggctgctgtggttcgggttctacatggtcgtcctgaactggggcgagcagcaggtggacgccggcacggccgccctcgtggtcaacgtcggcccgatcctcatcgcgctgctcggcgcgcggctgctgggcgacgcgctgccgccacggctgttgacggggatggcggtgtcgttcgccggtgcggtgaccgtgggcctgtccatgtccggcgagggcggttcctcgctgttcggggtggtgctgtgcctgctggccgcggtggcgtacgcgggcggggtggtggcccagaagcccgcgctggcgcacgcgagcgcccttcaggtgacgacgttcgggtgcctggtcggggcggtgctctgcctgccgttcgccgggcagctggtgcacgaggcggccggcgcgccggtctccgccacgctcaacatggtctacctgggcgtgttcccgaccgccctggcgttcacgacgtgggcctacgccctggcccgtacgaccgccggccgcatgggtgcgaccacgtacgccgtgcccgcgctggtcgtgctgatgtcgtggctggcactgggcgaggtcccggggctgctcaccctggcgggcggagcgctgtgcctggcgggcgtggccgtgtcccgctcgcgcaggcgcccggccgcggtccccgaccgggccgcgcccacggcggagccacggcgcgaggacgcggggcgggcctag

SEQ ID NO: 185 - DNA, 1005 bp, Streptomyces coelicolor
gtgccggtgcatacgtctgacagcgcccgcggcagccgcggcaagggcatcgggctcggcctggcactggcctccgcggtcgccttcggaggttccggagtcgcggccaaaccgctcatcgaggccgggctcgatccgctccacgtggtctggctgcgcgtcgcgggcgcggccctggtgatgctgccgctcgccgtgcgccaccgcgccctgccgcgccgccgtcccgcgctggtcgccgggtacggactgttcgccgtggccggtgtccaggcgtgctacttcgcggccatctcgcgcatccccgtcggcgtcgccctgctggtcgagtacctggcgcccgctctggtcctcggctgggtgcggttcgtgcaacggcggccggtcacacgcgccgccgcgctcggcgtggtcctggcggtcggcggcctcgcctgcgtggtcgaggtctggtcggggctgggcttcgacgccctcggactgctgctcgccctcggcgccgcttgctgccaggtcggctacttcgtcctgtccgaccagggcagcgacgccggcgaggaggcgcccgacccgctcggcgtcatcgcctacggcctgctggtcggcgccgccgtgctcaccatcgtcgcccggccctggtcgatggactggtccgtcctcgccggctcggcacccatggacggcacacccgtcgccgccgccctgctgctggcctggatcgtgctcatcgccacggtgctcgcctacgtcaccggaatcgtggccgtacgtcggctgtcgccgcaggtcgccggagtcgtggcgtgcctggaagcggtcatcgcgacggtcctggcgtgggtgctgctgggcgagcacctctccgccccgcaggtcgtcggcggcatcgtggtgctggcgggcgccttcatcgcccagtcctcgaccccggcgaagggctccgcggacccggtggccaggggcggtcccgaaagggagttgtcgagccggggaacgtcgacctag

SEQ ID NO: 186 - DNA, 894 bp, Pectobacterium chrysanthemi
gtgaaattaaaagatttcgctttttacgccccctgtgtctggggaaccacctactttgtcaccacccaatttctgcctgccgacaaaccgctgttggctgccctgatccgggcgttgcctgctggtattattctcattctcggtaaaactctgccgccggtcggctggctgtggcgcttgtttgtactgggcgcactcaatatcggcgtgttctttgtgatgctgttttttgctgcttatcgcctgcctggcggcgtggtggcgctggtggggtcgcttcagccgctgatcgtcatcctgttgtctttcctgttgctgacgcagccggtgctgaaaaagcagatggtggcggccgtggccggcggcatcggtattgcgttgctgatttcgctgccgaaagcgccgctgaaccccgccgggctggtggcatcggcattggcgacggtgagtatggcgtccggtctggtgctgactaaaaagtgggggcgcccggccggaatgacgatgctgacgtttaccggctggcagctgttttgcggcgggctggtgattctgccggtgcagatgctgacagagccgttgccggatgtggtgaccctgaccaaccttgccggttatttttacctggcgattcccggctctttactggcgtatttcatgtggttctccggtattgaagctaattcgccggtgatgatgtcgatgctgggttttctcagcccgttggtcgcgctgtttctgggctttttatttcttcaacaaggactttccggagcacaattggtcggagtggtattcattttctcggcgattattattgttcaggatgtttcgttatttagcagaagaaaaaaagtgaagcagttggagcaatctgactgtgctgtcaaataa

SEQ ID NO: 187 - DNA, 939 bp, Lactobacillus plantarum
atgaagcgtttagttggaactctgtgcggtattattagtgccgctttatttgggctaggtggaatactagcacagcctttgttaagtgagcaagttctgactccgcaacagattgtattgttacggctgttaatcggtggggcaatgttgttgctatatcgtaacttgtttttcaagcaggctagaaaaagcacgaaaaagatttggacacattggcgaattttaacacgaattatgatatacggcatcgccggcttgtgcacggcacaaattgcctttttttctgcgattaattacagtaatgcagcagttgcaactgtttttcagtccactagtccgtttattctgcttgtatttaccgcgctgaaagcgaaaagacttcccagtttattagcaggaatgagcttaataagcgcattgatgggaatctggcttattgttgaatccggatttaagaccggattaataaaaccggaagcaattatttttggcctgattgcggctatcggggttatcttatacaccaaactacctgttccattgttaaaccaaattgccgcagtggatattttgggatgggcactagttattggcggtgtgatagcgttgattcacacaccgttaccaaatttagttagattttcaaaaacgcagcttttagcggttcttatcattgttattctagccaccgttgttgcgtatgatctttatttagaaagtttaaagctaatagacggatttctggcaactatgactggactatttgaaccaatcagttccgtactttttggcatgttattcttgcaccaaatcttggttcctcaggccttggttggtattatattggttgtgggtgcaattatgatactgaatttacctcaccatatcacggcacctgttcccagcaaaacctgtcaatgtacgatgtctaatcaatag

SEQ ID NO: 188 - DNA, 885 bp, Lactobacillus plantarum
gtgaagaaaattgcgcccctgttcgttggcttaggggccattagttttggaattccggcgtcactatttaaaattgcgcgtcggcagggggttgtcaatggcccattgctattctggtcctttctgagtgcggttgtgattttaggtgtgattcaaattttacgccgtgcacgtttgcgtaatcagcaaacgaattggaagcaaatcggactggtaattgcggctggaacggcttcgggatttactaacaccttttacatacaggcgttaaagcttatcccagttgctgtggccgcggtaatgttgatgcaggcggtctggatatcaacattactaggagcagtgattcatcatcggcgtccctcccgactgcaagtggttagcattgttttggtattgataggcacgattttagctgctggtctgtttccaattacgcaggcgctctcgccgtggggcttgatgttaagttttttagcggcatgctcgtatgcttgcacgatgcagtttacggctagcttaggcaataacttagacccgttatcgaaaacatggttactgtgtttgggcgctttcatactcattgctatcgtgtggtcaccgcaattagttacggcacccaccacgccagcaacagtcggctggggagtactgattgcactattctcaatggttttcccactggttatgtattcattgtttatgccgtacttagagcttggcattggcccaatcctttcttctttagaattaccagcctcgattgttgttgcatttgtactgcttgatgaaactattgattgggtgcaaatggttggcgtggccattattattacggccgtaattctgccaaacgtgttaaatatgcgacgagttcggccatag

SEQ ID NO: 189 - DNA, 909 bp, Lactobacillus plantarum
atgacaactaaccgttatatgaagggcatcatgtgggcgatgttggcctcgaccctgtggggagtctcaggtacagtgatgcagttcgtatcacaaaaccaagccatcccggctgattggttcttatctgtaaggacgttatctgctggaatcattctgttagcgattggatttgtgcaacagggtaccaaaatcttcaaagtctttagatcttgggcgtcggttggacaattagtggcatacgcgacagtgggattgatggcgaatatgtatactttttacatcagtattgagcgcggaacagccgctgccgccactattttacaatacttaagtcctttgtttattgtactaggaacgttgctgtttaaacgggaactgcctttacggactgatttaattgcgtttgcggtctccttgttgggggtgtttttagcaatcactaagggtaatattcatgagttggcgattccgatggatgcactcgtctggggaatcctttcgggggtaacagcggccttgtacgtagtcttgccgcgaaagattgtagccgaaaattcaccggtcgtgattcttggttgggggacattgattgcgggaatcctatttaatttatatcacccaatttggatcggtgcaccaaaaattacaccaacgctagtgacttcaattggcgccatcgttttaatcgggacgatttttgctttcttatcgttgctacatagtctacagtacgcgccgtctgcggtggtcagtattgttgatgccgtccaaccagtagtgacttttgtactaagtattattttcttaggcttacaagtgacatgggtcgaaatcctcggctcgttattggtgattgtcgcgatttatatcttgcagcagtatcggagtgatccggctagtgattag

SEQ ID NO: 190 - DNA, 975 bp, Streptomyces coelicolor
gtgtcgaatgccgtctccggcctgcccgtagggcgtggcctcctctatctgatcgtcgccggtgtcgcctggggcaccgccggtgccgccgcctcgctggtctaccgggccagcgacctggggcccgtcgccctgtcgttctggcgttgcgcgatggggctcgtgctgctgctcgccgtccgcccgctgcgcccgcggctgcgcccgcggctgcgcccgcggctgcgcccggcggtccgcgaaccgttcgcccgcaggacgcttcgggccggtgtcaccggtgtcgggctcgcggtgttccagaccgcctacttcgccgccgtgcagtccaccggactcgccgtcgccacggtggtcaccctcggcgcggggcccgtactgatcgccctcggcgcgcgcctcgccctcggtgaacagctgggagcggggggtgccgcggccgtggccggcgccctcgccgggctcctggtgctcgtcctcggcggcggaagcgcgaccgtccgcctgccgggtgtgctcctcgcgctgctgtccgccgccgggtactcggtgatgacgctgctcacccgttggtggggacggggcggcggggcggacgcggccggtacgtccgtgggggcgttcgccgtcacgagtctgtgcctgctgccgttcgccctggccgagggcctggtgccgcacaccgcggaaccggtccggctgctgtggctcctcgcctacgtcgcggccgtcccgaccgcgctggcctacgggctctacttcgccggcgcggccgtcgtccggtccgcgacggtctccgtgatcatgctcctggagccggtcagtgcggccgcgctcgccgtcctgctgctcggcgagcacctcacggccgcgaccctggccggcacgctgctgatgctcggctcggtcgcgggtctcgcggtggcggagacccgggcggcgcgggaggcgaggacgcggccggcgcccgcgtga

SEQ ID NO: 191 - DNA, 1005 bp, Streptomyces coelicolor
gtgaacgtcctgctctcggccgccttcgttctgtgctggagctccggcttcatcggcgccaagctcggtgctcagaccgcggccacacccaccctcctgatgtggcgcttcctgcctctcgccgtggccctggtcgccgcggcggccgtctcccgggccgcctggcggggcctgacaccgcgggacgccggccggcagatcgccatcggcgccctgtcgcagagcggctatctgctcagcgtctactacgccatcgaactgggcgtctccagcggcaccaccgccctcatcgacggcgtccagccactcgtcgccggcgcgctcgccggtcccctgctgcgccagtacgtctcgcgcgggcagtggctcggactgtggctggggctgtcgggcgtggccaccgtgacggtcgccgacgccggggcggcgggcgcggaggtggcctggtgggcgtatctcgtcccgtttctcggcatgctgtcgctggtggcggccaccttcctggagggccgcacaagggtgccggtcgcgccccgcgtcgccctgacgatccactgtgcgaccagtgccgtcctcttctccggactggccctgggcctcggggcggcggcaccgccggccggttcctcgttctggctggcgaccgcctggctggtggtcctgccgaccttcggcggctacggcctgtactggctgatcctgcgccggtccggcatcaccgaggtcaacaccctcatgttcctcatggccccggtcacggccgtgtggggcgccctcatgttcggtgagccgttcggcgtccagaccgccctcggcctggcggtcggcctcgcggccgtggtcgtcgtccggcgcgggggcggcgcgcgccgggagcggcccgtgcggtccggcgcggaccgtccggcggccggagggccgacggcggaccagccgacgaacaggccgaccgacaggccgacggcggccgggtcgaccgacaggccgacggcggacaggcgctga

SEQ ID NO: 192 - DNA, 939 bp, Thermobifida fusca
atgtctgatttccgcaagggtgtgctctatggcgccagttcgtacttcatgtggggctttctgccgctctactggccgctgctgaccccgcctgccacggcctttgaggtcctcttacataggatgatctggtcattggttgtcacgctcgtggtgctgctggtgcagcggaactggcagtggatccgcggcgtgctgcggagcccgcggcgcctgctgctgctcctcgcctcggccgcactcatctccctgaactggggcgctttcatcaccgccgtgacgaccgggcacaccctgcaatcggcactcgcctacttcatcaacccgctggtgagcgtggcgctagggctgctggtgttcaaagagcggctgcgcccaggccagtgggccgcactgctgctcggcgtcctcgccgtagccgtgctgaccgtcgactacggctccctgccttggttggcgctggccatggcgttctccttcgccgtctacggcgcgctgaagaagttcgtgggcttggacggggtggagagcctcagcgcggagaccgcggtcctgttcctgcctgcgctgggcggcgcggtctacctggaagtgaccggtaccggcaccttcacctcggtctcccccctccacgcgttgctgctggtgggcgccggagtggtgaccgcggcgccgctcatgctgttcggcgcggcagcgcaccgcatcccgctgaccctggtcgggctgctgcagttcatggttccggtgatgcacttcctcatcgcctggctggtcttcggggaggacctgtcacttggccggtggatcgggttcgccgtggtgtggaccgcgctcgtggtgttcgtcgtcgacatgctccgccacgcacgccacaccccccgccctgccccgtcagcccctgtcgctgaggaagccgaggaaactgcggctagttga

SEQ ID NO: 193 - DNA, 1089 bp, Streptomyces coelicolor
gtggccgggtcgtccaggagtgatcagcgagtaggcctgctgaacggcttcgcggcgtacgggatgtgggggctcgtcccgctgttctggccgctgctcaagcccgccggggccggggagatcctcgcccaccggatggtgtggtccctcgccttcgtcgccgtcgccctcctcttcgtacggcgctgggcctgggccggcgagctgctgcggcagccgcgcaggctcgccctggtcgcggtggccgccgcggtcatcaccgtcaactggggcgtctacatctgggccgtgaacagcggccatgtcgtcgaggcctcgctcggctacttcatcaacccgctggtcaccatcgcgatgggcgtgctgttgctcaaggagcggctgcggcccgcgcagtgggcggcggtcggcaccggcttcgcggccgtgctcgtgctcgccgtcggctacggccagccgccgtggatctcgctctgcctcgccttctccttcgccacgtacggcctggtgaagaagaaggtcaacctcgggggtgtcgagtcgctggccgccgagacggcgatccagttccttccggcgctcggctacctgctgtggctgggcgcgcagggcgagtcgaccttcaccacggagggcgccggacactcggccctgctcgccgcgaccggcgtcgtcacggcgatcccgctggtctgcttcggcgcggcggcgatccgcgtcccgctgtccacactggggctgctgcaatacctggcgccggtcttccagttcctgctcggcgtcctctacttcggcgaggccatgccgcccgagcgctgggccggcttcgggctggtctggctggcgctgacgctgctcacctgggacgcgttgcgcacggcccgccggaccgcacgggcgctgagggaacaactggaccggtcgggcgcgggcgtaccaccgctcaagggggccgccgccgcgcgggagccgagggtcgtggcctcggggactccggcaccgggcgccggcgacgcaccgcagcaacagcaacagcaacagcaacagcaacagcaacagcaacacggaaccagggccgggaagccgtag

SEQ ID NO: 194 - DNA, 1026 bp, Lactobacillus plantarum
gtgaagaaagcatatctttacattgcaatttcgaccttaatgtttagttcgatggaaattgcgctaaagatggccggcagtgcctttaacccaatccaattgaatctaattcgattttttattggggcaattgtgttactgccatttgcattgcgggcattaaagcaaaccggacgaaagttagtgagtgctgactggcggctatttgctttaaccgggctagtgtgtgtcattgtcagtatgtcgctttaccaactcgcgattacggtcgatcaagcttcgactgtggccgtattgtttagttgtaatccggtatttgcgctattattctcctatttaattctgcgagaacggttgggtcgagctaacttgatctccgtcgtgatttctgtgattgggttgttgatcattgttaatccggcccatttgacgaatgggctcgggctgctattagccatcgggtctgccgtgacttttgggctgtacagtatcatctcgcgttatgggtctgttaaacggggcttgaatgggctgacgatgacttgttttactttctttgctggtgcgtttgaacttctagttttagcttggattactaagattccggctgtcgccaatgggttgacggccatcggtttgcggcaatttgctgccattccggttttggtgaatgttaatctcaactatttctggttactattttttatcggcgtttgtgttactggtgggggcttcgcgttttatttcttggcaatggaacaaaccgatgtttcaacggcttccctagtattcttcattaagccggggttggcgccaatcttagcagcgttgatcctccatgaacaaattttgtggacgacagtggtcggaattgttgtgattttgattggttccgtcgtgacctttgtcggtaatcggttccgtgaacgggatacgatgggtgcgattgagcagccaacagcggccgccactgatgatgaacatgtcatcaaagccgcacacgccgtttcaaatcaagaaaattaa

SEQ ID NO: 195 - DNA, 1416 bp, Thermobifida fusca
gtgaacgccgacaccctcctgtggtccctgctgctcggcgtcatcgtcgtcgctgccgcggcggcgatcatcatccccaccgtgcggaacagcagcacggctcccccgcccggggcggtagggaccgcgctgggtgcggcgctcaccgccgctgccctcggcatagcgggcagcggaaccgctcccgcctccgaagtgcccgcgggctccggccaggtccgtaccgtcgacgtggtgctgggcgacatgaccgtctccccgtcccacgtcaccgtcgcgcccggcgactccctcgtcctccgcgtgcgcaacgaggacactcaagtccacgacttggtggtggagaccggggcccgcacgccccggcttgcgccaggtgacagcgccaccctgcaggtcggcacggtgaccgagcccatcgacgcctggtgcactgtgctcgggcacagcgccgcgggcatgcggatgcggatcgacaccactgacactgcggacagcgctgacagccccgacacgcccgctggtgcggacagcggtccgcccgcaccgctccccctgtccgcggagatgagcgacgactggcagccccgcgacgctgtcctgccgcccgcgccggaccgcaccgaacacgaagtggagatccgggtcaccgaaaccgagctggaggtcgcccccggggtgcggcagagcgtgtggacgttcggcggcgacgtccccggccctgtgctgcgcggcaaggtcggcgacgtgttcaccgtgaccttcgtcaacgacggcacgatgggccacggcatcgacttccacgccagcagtctcgccccggacgagccgatgcgcacgatcaatccgggcgagcgcctcacctaccggttccgcgcggagaaagccggtgcctgggtgtaccactgttcgacctcgcccatgctgcagcacatcggcaacggcatgtacggcgcggtcatcatcgacccgcccgaccttgagccggtcgaccgtgaatacctgctggtccaaggagagctgtacctgggcgagccgggcagcgccgaccaggtcgcccggatgcgggcgggtgagccggacgcgtgggtgttcaacggggtcgccgccggctacgcccacgcgccgttgaccgccgaggtcggggagcgcgtccggatctgggtggtggcggccggtcccaccagcggaacgtctttccacatcgtcggcgcccagttcgacaccgtctacaaggagggtgcctacctggtgcgccgtggcgacgccgggggcgcgcaagcgctcgacctggcggtcgcccaaggcggttttgtcgaaacagtgttccccgaagcgggctcctatccctttgtcgaccatgacatgcggcatgccgagaacggggcccgcggcttcttcacgatcacggagtga

SEQ ID NO: 196 - protein, 207 aa, Coryne-bacterium glutamicum
MDAASWVAFALALLVALAVPGPDLVLVLHSATRGIRTGVMTAAGIMTGLMLHASLAIAGATALLLSAPGVLSAIQLLGAGVLLWMGTNMFRASQNTGESETAASQSSAGYFRGFITNATNPKALLFFAAILPQFIGNGEDMKMRTLALCATIVLGSGAWWLGTIALVRGIGLQKLPSADRIITLVGGIALFLIGAGLLVNTAYGLIT

SEQ ID NO: 197 - protein, 513 aa, Coryne-bacterium glutamicum
MVLVIAGIIHPLLPEYRWVLIHLFTLGAITNSIVVWSQHFTEKFLHLKLEESKRPAQLLKIRVLNVGIIVTIIGQMIGQWIVTSVGATIVGGALAWHAGSLASQFRSAKRGQPFASAVIAYVASACCLPFGAFAGALLSKELSGHLQERVLLTHTVINFLGFVGFAALGSLSVLFAAIWRTKIRHNFTPWSVGIMAVSLPIIVTGILLNNGYVAATGLAAYVAAWLLAMVGWGKASISNLSFSTSTSTTAPLWLVGTLVWLAVQAVMHDGELYHVEVPTIALVIGFGAQLLIGVMSYLLPSTMGGGASAVRTGTHILNTAGLFRWTLINGGLAIWLLTDNSWLRVVVSLLSIGALAVFVILLPKAVRAQRGVITKKREPITPPEEPRLNQITAGISVLALILAAFGGLNPGVAPVASSNEDVYAVTITAGDMVFIPDVIEVPAGKSLEVTMLNEDDMVHDLKFANGVQTGRVAPGDEITVTVGDISEDMDGWCTIAGHRAQGMDLEVKVAAPN

SEQ ID NO: 198 - protein, 489 aa, Coryne-bacterium glutamicum
MLSFATLRGRISTVDAAKAAPPPSPLAPIDLTDHSQVAGVMNLAARIGDILLSSGTSNSDTKVQVRAVTSAYGLYYTHVDITLNTITIFTNIGVERKMPVNVFHVVGKLDTNFSKLSEVDRLIRSIQAGATPPEVAEKILDELEQSPASYGFPVALLGWAMMGGAVAVLLGGGWQVSLIAFITAFTIIATTSFLGKKGLPTFFQNVVGGFIATLPASIAYSLALQFGLEIKPSQIIASGIVVLLAGLTLVQSLQDGITGAPVTASARFFETLLFTGGIVAGVGLGIQLSEILHVMLPAMESAAAPNYSSTFARIIAGGVTAAAFAVGCYAEWSSVIIAGLTALMGSAFYYLFVVYLGPVSAAAIAATAVGFTGGLLARRFLIPPLIVAIAGITPMLPGLAIYRGMYATLNDQTLMGFTNIAVALATASSLAAGVVLGEWIARRLRRPPRFNPYRAFTKANEFSFQEEAEQNQRRQRKRPKTNQRFGNKR

SEQ ID NO: 199 - protein, 286 aa, Coryne-bacterium glutamicum
MNDAGLKTRNPVLAPILMVVNGVSLYAGAALAVGLFESFPPALVAWMRVAAAAVILLVLYRPAVRNFIGQTGFYAAVYGVSTLAMNITFYEAIARIPMGTAVAIEFLGPIAVAALGSKTLRDWAALVLAGIGVIIISGAQWSANSVGVMFALAAALLWAAYIIAGNRIAGDASSSRTGMAVGFTWASVLSLPLAIWWWPGLGATELTLIEVIGLALGLGVLSAVIPYGLDQIVLRMAGRSYFALLLAILPISAALMGALALGQMLSVAELVGIVLVVIAVALRRPS

SEQ ID NO: 200 - protein, 280 aa, Corynebacterium glutamicum
MIFGVLAYLGWGMFPAFFPLLLPAGPFEILAHRILWTAVLMMIIISFTSGWKELKSADRGTWLRIILSSLFIAGNWLIYVIAVNSGQVTEAALGYFINPLLSVVLGIVFFKEQLRKLQISAVVIAAAGVLVLTFLGDKPPYLAITLAFTFGIYGALKKQVKMSAASSLCAETLVLLPIAVIYLIGLEASGHSTFFNNGSGHMALLICSGLVTAVPLLMFALAAKAIPLSTVGMLQYLTPTMQMLWALFVVNESVEPMRWFGFVFIWIAVTIYITDSLLKK

SEQ ID NO: 201 - protein, 301 aa, Coryne-bacterium glutamicum
MNKQSAAVLMVMGSALSLQFGAAIGTQLFPLNGPWAVTSLRLFIAGLIMCLVIRPRLRSWTKKQWIAVLLLGLSLGGMNSLFYASIELIPLGTAVTIEFLGPLIFSAVLARTLKNGLCVALAFLGMALLGIDSLSGETLDPLGVIFAAVAGIFWVCYILASKKIGQLIPGTSGLAVALIIGAVAVFPLGATHMGPIFQTPTLLILALGTALLGSLIPYSLELSALRRLPAPIFSILLSLEPAFAAAVGWILLDQTPTALKWAAIILVIAASIGVTWEPKKMLVDAPLHSKCNAKRRVHTPS

SEQ ID NO: 202 - protein, 421 aa, Corynebacterium glutamicum
MALVVQKYGGSSLESAERIRNVAERIVATKKAGNDVVVVCSAMGDTTDELLELAAAVNPVPPAREMDMLLTAGERISNALVAMAIESLGAEAQSFTGSQAGVLTTERHGNARIVDVTPGRVREALDEGKICIVAGFQGVNKETRDVTTLGRGGSDTTAVALAAALNADVCEIYSDVDGVYTADPRIVPNAQKLEKLSFEEMLELAAVGSKILVLRSVEYARAFNVPLRVRSSYSNDPGTLIAGSMEDIPVEEAVLTGVATDKSEAKVTVLGISDKPGEAAKVFRALADAEINIDMVLQNVSSVEDGTTDITFTCPRSDGRRAMEILKKLQVQGNWTNVLYDDQVGKVSLVGAGMKSHPGVTAEFMEALRDVNVNIELISTSEIRISVLIREDDLDAAARALHEQFQLGGEDEAVVYAGTGR

SEQ ID NO: 203 - protein, 449 aa, Escherichia coli
MSEIVVSKFGGTSVADFDAMNRSADIVLSDANVRLVVLSASAGITNLLVALAEGLEPGERFEKLDAIRNIQFAILERLRYPNVIREEIERLLENITVLAEAAALATSPALTDELVSHGELMSTLLFVEILRERDVQAQWFDVRKVMRTNDRFGRAEPDIAALAELAALQLLPRLNEGLVITQGFIGSENKGRTTTLGRGGSDYTAALLAEALHASRVDIWTDVPGIYTTDPRVVSAAKRIDEIAFAEAAEMATFGAKVLHPATLLPAVRSDIPVFVGSSKDPRAGGTLVCNKTENPPLFRALALRRNQTLLTLHSLNMLHSRGFLAEVFGILARHNISVDLITTSEVSVALTLDTTGSTSTGDTLLTQSLLMELSALCRVEVEEGLALVALIGNDLSKACGVGKEVFGVLEPFNIRMICYGASSHNLCFLVPGEDAEQVVQKLHSNLFE

SEQ ID NO: 204 - protein, 344 aa, Corynebacterium glutamicum
MTTIAVVGATGQVGQVMRTLLEERNFPADTVRFFASPRSAGRKIEFRGTEIEVEDITQATEESLKDIDVALFSAGGTASKQYAPLFAAAGATVVDNSSAWRKDDEVPLIVSEVNPSDKDSLVKGIIANPNCTTMAAMPVLKPLHDAAGLVKLHVSSYQAVSGSGLAGVETLAKQVAAVGDHNVEFVHDGQAADAGDVGPYVSPIAYNVLPFAGNLVDDGTFETDEEQKLRNESRKILGLPDLKVSGTCVRVPVFTGHTLTIHAEFDKAITVDQAQEILGAASGVKLVDVPTPLAAAGIDESLVGRIRQDSTVDDNRGLVLVVSGDNLRKGAALNTIQIAELLVK

SEQ ID NO: 205 - protein, 367 aa, Escherichia coli
MKNVGFIGWRGMVGSVLMQRMVEERDFDAIRPVFFSTSQLGQAAPSFGGTTGTLQDAFDLEALKALDIIVTCQGGDYTNEIYPKLRESGWQGYWIDAASSLRMKDDAIIILDPVNQDVITDGLNNGIRTFVGGNCTVSLMLMSLGGLFANDLVDWVSVATYQAASGGGARHMRELLTQMGHLYGHVADELATPSSAILDIERKVTTLTRSGELPVDNFGVPLAGSLIPWIDKQLDNGQSREEWKGQAETNKILNTSSVIPVDGLCVRVGALRCHSQAFTIKLKKDVSIPTVEELLAAHNPWAKVVPNDREITMRELTPAAVTGTLTTPVGRLRKLNMGPEFLSAFTVGDQLLWGAAEPLRRMLRQLA

SEQ ID NO: 206 - protein, 919 aa, Coryne-bacterium glutamicum
MTDFLRDDIRFLGQILGEVIAEQEGQEVYELVEQARLTSFDIAKGNAEMDSLVQVFDGITPAKATPIARAFSHFALLANLAEDLYDEELREQALDAGDTPPDSTLDATWLKLNEGNVGAEAVADVLRNAEVAPVLTAHPTETRRRTVFDAQKWITTHMRERHALQSAEPTARTQSKLDEIEKNIRRRITILWQTALIRVARPRIEDEIEVGLRYYKLSLLEEIPRINRDVAVELRERFGEGVPLKPVVKPGSWIGGDHDGNPYVTAETVEYSTHRAAETVLKYYARQLHSLEHELSLSDRMNKVTPQLLALADAGHNDVPSRVDEPYRRAVHGVRGRILATTAELIGEDAVEGVWFKVFTPYASPEEFLNDALTIDHSLRESKDVLIADDRLSVLISAIESFGFNLYALDLRQNSESYEDVLTELFERAQVTANYRELSEAEKLEVLLKELRSPRPLIPHGSDEYSEVTDRELGIFRTASEAVKKFGPRMVPHCIISMASSVTDVLEPMVLLKEFGLIAANGDNPRGTVDVIPLFETIEDLQAGAGILDELWKIDLYRNYLLQRDNVQEVMLGYSDSNKDGGYFSANWALYDAELQLVELCRSAGVKLRLFHGRGGTVGRGGGPSYDAILAQPRGAVQGSVRITEQGEIISAKYGNPETARRNLEALVSATLEASLLDVSELTDHQRAYDIMSEISELSLKKYASLVHEDQGFIDYFTQSTPLQEIGSLNIGSRPSSRKQTSSVEDLRAIPWVLSWSQSRVMLPGWFGVGTALEQWIGEGEQATQRIAELQTLNESWPFFTSVLDNMAQVMSKAELRLAKLYADLIPDTEVAERVYSVIREEYFLTKKMFCVITGSDDLLDDNPLLARSVQRRYPYLLPLNVIQVEMMRRYRKGDQSEQVSRNIQLTMNGLSTALRNSG

SEQ ID NO: 207 - protein, 883 aa, Escherichia coli
MNEQYSALRSNVSMLGKVLGETIKDALGEHILERVETIRKLSKSSRAGNDANRQELLTTLQNLSNDELLPVARAFSQFLNLANTAEQYHSISPKGEAASNPEVIARTLRKLKNQPELSEDTIKKAVESLSLELVLTAHPTEITRRTLIHKMVEVNACLKQLDNKDIADYEHNQLMRRLRQLIAQSWHTDEIRKLRPSPVDEAKWGFAVVENSLWQGVPNYLRELNEQLEENLGYKLPVEFVPVRFTSWMGGDRDGNPNVTADITRHVLLLSRWKATDLFLKDIQVLVSELSMVEATPELLALVGEEGAAEPYRYLMKNLRSRLMATQAWLEARLKGEELPKPEGLLTQNEELWEPLYACYQSLQACGMGIIANGDLLDTLRRVKCFGVPLVRIDIRQESTRHTEALGELTRYLGIGDYESWSEADKQAFLIRELNSKRPLLPRNWQPSAETREVLDTCQVIAEAPQGSIAAYVISMAKTPSDVLAVHLLLKEAGIGFAMPVAPLFETLDDLNNANDVMTQLLNIDWYRGLIQGKQMVMIGYSDSAKDAGVMAASWAQYQAQDALIKTCEKAGIELTLFHGRGGSIGRGGAPAHAALLSQPPGSLKGGLRVTEQGEMIRFKYGLPEITVSSLSLYTGAILEANLLPPPEPKESWRRIMDELSVISCDVYRGYVRENKDFVPYFRSATPEQELGKLPLGSRPAKRRPTGGVESLRAIPWIFAWTQNRLMLPAWLGAGTALQKVVEDGKQSELEAMCRDWPFFSTRLGMLEMVFAKADLWLAEYYDQRLVDKALWPLGKELRNLQEEDIKVVLAIANDSHLMADLPWIAESIQLRNIYTDPLNVLQAELLHRSRQAEKEGQEPDPRVEQALMVTIAGIAAGMRNTG

SEQ ID NO: 208 - protein, 1140 aa, Coryne-bacterium glutamicum
MSTHTSSTLPAFKKILVANRGEIAVRAFRAALETGAATVAIYPREDRGSFHRSFASEAVRIGTEGSPVKAYLDIDEIIGAAKKVKADAIYPGYGFLSENAQLARECAENGITFIGPTPEVLDLTGDKSRAVTAAKKAGLPVLAESTPSKNIDEIVKSAEGQTYPIFVKAVAGGGGRGMRFVASPDELRKLATEASREAEAAFGDGAVYVERAVINPQHIEVQILGDHTGEVVHLYERDCSLQRRHQKVVEIAPAQHLDPELRDRICADAVKFCRSIGYQGAGTVEFLVDEKGNHVFIEMNPRIQVEHTVTEEVTEVDLVKAQMRLAAGATLKELGLTQDKIKTHGAALQCRITTEDPNNGFRPDTGTITAYRSPGGAGVRLDGAAQLGGEITAHFDSMLVKMTCRGSDFETAVARAQRALAEFTVSGVATNIGFLRALLREEDFTSKRIATGFIADHPHLLQAPPADDEQGRILDYLADVTVNKPHGVRPKDVAAPIDKLPNIKDLPLPRGSRDRLKQLGPAAFARDLREQDALAVTDTTFRDAHQSLLATRVRSFALKPAAEAVAKLTPELLSVEAWGGATYDVAMRFLFEDPWDRLDELREAMPNVNIQMLLRGRNTVGYTPYPDSVCRAFVKEAASSGVDIFRIFDALNDVSQMRPAIDAVLETNTAVAEVAMAYSGDLSDPNEKLYTLDYYLKMAEEIVKSGAHILAIKDMAGLLRPAAVTKLVTALRREFDLPVHVHTHDTAGGQLATYFAAAQAGADAVDGASAPLSGTTSQPSLSAIVAAFAHTRRDTGLSLEAVSDLEPYWEAVRGLYLPFESGTPGPTGRVYRHEIPGGQLSNLRAQATALGLADRFELIEDNYAAVNEMLGRPTKVTPSSKVVGDLALHLVGAGVDPADFAADPQKYDIPDSVIAFLRGELGNPPGGWPEPLRTRALEGRSEGKAPLTEVPEEEQAHLDADDSKERRNSLNRLLFPKPTEEFLEHRRRFGNTSALDDREFFYGLVEGRETLIRLPDVRTPLLVRLDAISEPDDKGMRNVVANVNGQIRPMRVRDRSVESVTATAEKADSSNKGHVAAPFAGVVTVTVAEGDEVKAGDAVAIIEAMKMEATITASVDGKIDRVVVPAATKVEGGDLIVVVS

SEQ ID NO: 209 - protein, 445 aa, Coryne-bacterium glutamicum
MTSASAPSFNPGKGPGSAVGIALLGFGTVGTEVMRLMTEYGDELAHRIGGPLEVRGIAVSDISKPREGVAPELLTEDAFALIEREDVDIVVEVIGGIEYPREVVLAALKAGKSVVTANKALVAAHSAELADAAEAANVDLYFEAAVAGAIPVVGPLRRSLAGDQIQSVMGIVNGTTNFILDAMDSTGADYADSLAEATRLGYAEADPTADVEGHDAASKAAILASIAFHTRVTADDVYCEGISNISAADIEAAQQAGHTIKLLAICEKFTNKEGKSAISARVHPTLLPVSHPLASVNKSFNAIFVEAEAAGRLMFYGNGAGGAPTASAVLGDVVGAARNKVHGGRAPGESTYANLPIADFGETTTRYHLDMDVEDRVGVLAELASLFSEQGISLRTIRQEERDDDARLIVVTHSALESDLSRTVELLKAKPVVKAINSVIRLERD

SEQ ID NO: 210 - protein, 809 aa, Escherichia coli
SVIAQAGAKGRQLHKFGGSSLADVKCYLRVAGIMAEYSQPDDMMVVSAAGSTTNRLISWLKLSQTDRLSAHQVQQTLRRYQCDLISGLLPAEEADSLISAFVSDLERLAALLDSGINDAVYAEVVGHGEVWSARLMSAVLNQQGLPAAWLDAREFLRAERAAQPQVDEGLSYPLLQQLLVQHPGKRLVVTGFISRNNAGETVLLGRNGSDYSATQIGALAGVSRVTIWSDVAGVYSADPRKVKDACLLPLLRLDEASELARLAAPVLHARTLQPVSGSEIDLQLRCSYTPDQGSTRIERVLASGTGARIVTSHDDVCLIEFQVPASQDFKLGHKEIDQILKRAQVRPLAVGVHNDRQLLQFCYTSEVADSALKILDEAGLPGELRLRQGLALVAMVGAGVTRNPLHCHRFWQQLKGQPVEFTWQSDDGISLVAVLRTGPTESLIQGLHQSVFRAEKRIGLVLFGKGNIGSRWLELFAREQSTLSARTGFEFVLAGVVDSRRSLLSYDGLDASRALAFFNDEAVEQDEESLFLWMRAHPYDDLVVLDVTASQQLADQYLDFASHGFHVISANKLAGASDSNKYRQIHDAFEKTGRHWLYNATVGAGLPINHTVRDLIDSGDTILSISGIFSGTLSWLFLQFDGSVPFTELVDQAWQQGLTEPDPRDDLSGKDVSRKLVILAREAGYNIEPDQVRVESLVPAHCEGGSIDHFFENGDELNEQMVQRLEAAREMGLVLRYVARFDANGKARVGVEAVREDHPLRSLLPCDNVFAIESRWYRDNPLVIRGPGAGRDVTAGAIQSDINRLAQLL

SEQ ID NO: 211 - protein, 820 aa, Escherichia coli
MRVLKFGGTSVANAERFLRVADILESNARQGQVATVLSAPAKITNHLVAMIEKTISGQDALPNISDAERIFAELLTGLAAAQPGFPLAQLKTFVDQEFAQIKHVLHGISLLGQCPDSINAALICRGEKMSIAIMAGVLEARGHNVTVIDPVEKLLAVGHYLESTVDIAESTRRIAASRIPADHMVLMAGFTAGNEKGELVVLGRNGSDYSAAVLAACLRADCCEIWTDVDGVYTCDPRQVPDARLLKSMSYQEAMELSYFGAKVLHPRTITPIAQFQIPCLIKNTGNPQAPGTLIGASRDEDELPVKGISNLNNMAMFSVSGPGMKGMVGMAARVFAAMSRARISVVLITQSSSEYSISFCVPQSDCVRAERAMQEEFYLELKEGLLEPLAVTERLAIISVVGDGMRTLRGISAKFFAALARANINIVAIAQGSSERSISVVVNNDDATTGVRVTHQMLFNTDQVIEVFVIGVGGVGGALLEQLKRQQSWLKNKHIDLRVCGVANSKALLTNVHGLNLENWQEELAQAKEPFNLGRLIRLVKEYHLLNPVIVDCTSSQAVADQYADFLREGFHVVTPNKKANTSSMDYYHQLRYAAEKSRRKFLYDTNVGAGLPVIENLQNLLNAGDELMKFSGILSGSLSYIFGKLDEGMSFSEATTLAREMGYTEPDPRDDLSGMDVARKLLILARETGRELELADIEIEPVLPAEFNAEGDVAAFMANLSQLDDLFAARVAKARDEGKVLRYVGNIDEDGVCRVKIAEVDGNDPLFKVKNGENALAFYSHYYQPLPLVLRGYGAGNDVTAAGVFADLLRTLSWKLGV

SEQ ID NO: 212 - protein, 379 aa, Corynebacterium glutamicum
MPTLAPSGQLEIQAIGDVSTEAGAIITNAEIAYHRWGEYRVDKEGRSNVVLIEHALTGDSNAADWWADLLGPGKAINTDIYCVICTNVIGGCNGSTGPGSMHPDGNFWGNRFPATSIRDQVNAEKQFLDALGITTVAAVVLLGGSMGGARTLEWAAMYPETVGAAAVLAVSARASAWQIGIQSAQIKAIENDHHWHEGNYYESGCNPATGLGAARRIAHLTYRGELEIDERFGTKAQKNENPLGPYRKPDQRFAVESYLDYQADKLVQRFDAGSYVLLTDALNRHDIGRDRGGLNKALESIKVPVLVAGVDTDILYPYHQQEHLSRNLGNLLAMAKIVSPVGHDAFLTESRQMDRIVRNFFSLISPDEDNPSTYIEFYI

SEQ ID NO: 213 - protein, 309 aa, Escherichia coli [sequence omitted]

SEQ ID NO: 214 - protein, 437 aa, Coryne-bacterium glutamicum
MPKYDNSNADQWGFETRSIHAGQSVDAQTSARNLPIYQSTAFVFDSAEHAKQRFALEDLGPVYSRLTNPTVEALENRIASLEGGVHAVAFSSGQAATTNAILNLAGAGDHIVTSPRLYGGTETLFLITLNRLGIDVSFVENPDDPESWQAAVQPNTKAFFGETFANPQADVLDIPAVAEVAHRNSVPLIIDNTIATAALVRPLELGADVVVASLTKFYTGNGSGLGGVLIDGGKFDWTVEKDGKPVFPYFVTPDAAYHGLKYADLGAPAFGLKVRVGLLRDTGSTLSAFNAWAAVQGIDTLSLRLERHNENAIKVAEFLNNHEKVEKVNFAGLKDSPWYATKEKLGLKYTGSVLTFEIKGGKDEAWAFIDALKLHSNLANIGDVRSLVVHPATTTHSQSDEAGLARAGVTQSTVRLSVGIETIDDIIADLEGGFAAI

SEQ ID NO: 215 - protein, 407 aa, Coryne-bacterium glutamicum
MAQPTAVRLFTSESVTEGHPDKICDAISDTILDALLEKDPQSRVAVETVVTTGIVHVVGEVRTSAYVEIPQLVRNKLIEIGFNSSEVGFDGRTCGVSVSIGEQSQEIADGVDNSDEARTNGDVEEDDRAGAGDQGLMFGYATNETEEYMPLPIALAHRLSRRLTQVRKEGIVPHLRPDGKTQVTFAYDAQDRPSHLDTVVISTQHDPEVDRAWLETQLREHVIDWVIKDAGIEDLATGEITVLINPSGSFILGGPMGDAGLTGRKIIVDTYGGMARHGGGAFSGKDPSKVDRSAAYAMRWVAKNIVAAGLADRAEVQVAYAIGRAKPVGLYVETFDTNKEGLSDEQIQAAVLEVFDLRPAAIIRELDLLRPIYADTAAYGHFGRTDLDLPWEAIDRVDELRAALKLA

SEQ ID NO: 216 - protein, 384 aa, Escherichia coli
MAKHLFTSESVSEGHPDKIADQISDAVLDAILEQDPKARVACETYVKTGMVLVGGEITTSAWVDIEEITRNTVREIGYVHSDMGFDANSCAVLSAIGKQSPDINQGVDRADPLEQGAGDQGLMFGYATNETDVLMPAPITYAHRLVQRQAEVRKNGTLPWLRPDAKSQVTFQYDDGKIVGIDAVVLSTQHSEEIDQKSLQEAVMEEIIKPILPAEWLTSATKFFINPTGRFVIGGPMGDCGLTGRKIIVDTYGGMARHGGGAFSGKDPSKVDRSAAYAARYVAKNIVAAGLADRCEIQVSYAIGVAEPTSIMVETFGTEKVPSEQLTLLVREFFDLRPYGLIQMLDLLHPIYKETAAYGHFGREHFPWEKTDKAQLLRDAAGLK

SEQ ID NO: 217 - protein, 368 aa, Coryne-bacterium glutamicum
MRFPELEELKNRRTLKWTRFPEDVLPLWVAESDFGTCPQLKEAMADAVEREVFGYPPDATGLNDALTGFYERRYGFGPNPESVFAIPDVVRGLKLAIEHFTKPGSAIIVPLPAYPPFIELPKVTGRQAIYIDAHEYDLKEIEKAFADGAGSLLFCNPHNPLGTVFSEEYIRELTDIAAKYDARIIVDEIHAPLVYEGTHVVAAGVSENAANTCITITATSKAWNTAGLKCAQIFFSNEADVKAWKNLSDITRDGVSILGLIAAETVYNEGEEFLDESIQILKDNRDFAAAELEKLGVKVYAPDSTYLMWLDFAGTKIEEAPSKILREEGKVMLNDGAAFGGFTTCARLNFACSRETLEEGLRRIASVL

SEQ ID NO: 218 - protein, 395 aa, Escherichia coli
MADKKLDTQLVNAGRSKKYTLGAVNSVIQRASSLVFDSVEAKKHATRNRANGELFYGRRGTLTHFSLQQAMCELEGGAGCVLFPCGAAAVANSILAFIEQGDHVLMTNTAYEPSQDFCSKILSKLGVTTSWFDPLIGADIVKHLQPNTKIVFLESPGSITMEVHDVPAIVAAVRSVVPDAIIMIDNTWAAGVLFKALDFGIDVSIQAATKYLVGHSDAMIGTAVCNARCWEQLRENAYLMGQMVDADTAYITSRGLRTLGVRLRQHHESSLKVAEWLAEHPQVARVNHPALPGSKGHEFWKRDFTGSSGLFSFVLKKKLNNEELANYLDNFSLFSMAYSWGGYESLILANQPEHIAAIRPQGEIDFSGTLIRLHIGLEDVDDLIADLDAGFARIV

SEQ ID NO: 219 - protein, 447 aa, Coryne-bacterium glutamicum
MTVDEQVSNYYDMLLKRNAGEPEFHQAVAEVLESLKLVLEKDPHYADYGLIQRLCEPERQLIFRVPWVDDQGQVHVNRGFRVQFNSALGPYKGGLRFHPSVNLGIVKFLGFEQIFKNSLTGLPIGGGKGGSDFDPKGKSDLEIMRFCQSFMTELHRHIGEYRDVPAGDIGVGGREIGYLFGHYRRMANQHESGVLTGKGLTWGGSLVRTEATGYGCVYFVSEMIKAKGESISGQKIIVSGSGNVATYAIEKAQELGATVIGFSDSSGWVHTPNGVDVAKLREIKEVRRARVSVYADEVEGATYHTDGSIWDLKCDIALPCATQNELNGENAKTLADNGCRFVAEGANMPSTPEAVEVFRERDIRFGPGKATPEAVEVFRERDIRFGPGKAVNVGGVATSALEMQQNASRETCAETAAEYGHENDYVVGANIAGFKKVADAMLAQGVI

SEQ ID NO: 220 - protein, 447 aa, Escherichia coli
MDQTYSLESFLNHVQKRDPNQTEFAQAVREVMTTLWPFLEQNPKYRQMSLLERLVEPERVIQFRVVWVDDRNQIQVNRAWRVQFSSAIGPYKGGMRFHPSVNLSILKFLGFEQTFKNALTTLPMGGGKGGSDFDPKGKSEGEVMRFCQALMTELYRHLGADTDVPAGDIGVGGREVGFMAGMMKKLSNNTACVFTGKGLSFGGSLIRPEATGYGLVYFTEAMLKRHGMGFEGMRVSVSGSGNVAQYAIEKAMEFGARVITASDSSGTVVDESGFTKEKLARLIEIKASRDGRVADYAKEFGLVYLEGQQPWSLPVDIALPCATQNELDVDAAHQLIANGVKAVAEGANMPTTIEATELFQQAGVLFAPGKAANAGGVATSGLEMAQNAARLGWKAEKVDARLHHIMLDIHHACVEHGGEGEQTNYVQGANIAGFVKVADAMLAQGVI

SEQ ID NO: 221 - protein, 543 aa, Coryne-bacterium glutamicum
MTISSPLIDVANLPDINTTAGKIADLKARRAEAHFPMGEKAVEKVHAAGRLTARERLDYLLDEGSFIETDQLARHRTTAFGLGAKRPATDGIVTGWGTIDGREVCIFSQDGTVFGGALGEVYGEKMIKIMELAIDTGRPLIGLYEGAGARIQDGAVSLDFISQTFYQNIQASGVIPQISVIMGACAGGNAYGPALTDFVVMVDKTSKMFVTGPDVIKTVTGEEITQEELGGATTHMVTAGNSHYTAATDEEALDWVQDLVSFLPSNNRSYAPMEDFDEEEGGVEENITADDLKLDEIIPDSATVPYDVRDVIECLTDDGEYLEIQADRAENVVIAFGRIEGQSVGFVANQPTQFAGCLDIDSSEKAARFVRTCDAFNIPIVMLVDVPGFLPGAGQEYGGILRRGAKLLYAYGEATVPKITVTMRKAYGGAYCVMGSKGLGSDINLAWPTAQIAVMGAAGAVGFIYRKELMAADAKGLDTVALAKSFEREYEDHMLNPYHAAERGLIDAVILPSETRGQISRNLRLLKHKNVTRPARKHGNMPL

SEQ ID NO: 222 - protein, 1221 aa, Coryne-bacterium glutamicum
MSTSVTSPAHNNAHSSEFLDALANHVLIGDGAMGTQLQGFDLDVEKDFLDLEGCNEILNDTRPDVLRQIHRAYFEAGADLVETNTFGCNLPNLADYDIADRCRELAYKGTAVAREVADEMGPGRNGMRRFVVGSLGPGTKLPSLGHAPYADLRGHYKEAALGIIDGGGDAFLIETAQDLLQVKAAVHGVQDAMAELDTFLPIICHVTVETTGTMLMGSEIGAALTALQPLGIDMIGLNCATGPDEMSEHLRYLSKHADIPVSVMPNAGLPVLGKNGAEYPLEAEDLAQALAGFVSEYGLSMVGGCCGTTPEHIRAVRDAVVGVPEQETSTLTKIPAGPVEQASREVEKEDSVASLYTSVPLSQETGISMIGERTNSNGSKAFREAMLSGDWEKCVDIAKQQTRDGAHMLDLCVDYVGRDGTADMATLAALLATSSTLPIMIDSTEPEVIRTGLEHLGGRSIVNSVNFEDGDGPESRYQRIMKLVKQHGAAVVALTIDEEGQARTAEHKVRIAKRLIDDITGSYGLDIKDIVVDCLTFPISTGQEETRRDGIETIEAIRELKKLYPEIHTTLGLSNISFGLNPAARQVLNSVFLNECIEAGLDSAIAHSSKILPMNRIDDRQREVALDMVYDRRTEDYDPLQEFMQLFEGVSAADAKDARAEQLAAMPLFERLAQRIIDGDKNGLEDDLEAGMKEKSPIAIINEDLLNGMKTVGELFGSGQMQLPFVLQSAETMKTAVAYLEPFMEEEAEATGSAQAEGKGKIVVATVKGDVHDIGKNLVDIILSNNGYDVVNLGIKQPLSAMLEAAEEHKADVIGMSGLLVKSTVVMKENLEEMNNAGASNYPVILGGAALTRTYVENDLNEVYTGEVYYARDAFEGLRLMDEVMAEKRGEGLDPNSPEAIEQAKKKAERKARNERSRKIAAERKANAAPVIVPERSDVSTDTPTAAPPFWGTRIVKGLPLAEFLGNLDERALFMGQWGLKSTRGNEGPSYEDLVETEGRPRLRYWLDRLKSEGILDHVALVYGYFPAVAEGDDVVILESPDPHAAERMRFSFPRQQRGRFLCIADFIRPREQAVKDGQVDVMPFQLVTMGNPIADFANELFAANEYREYLEVHGIGVQLTEALAEYWHSRVRSELKLNDGGSVADFDPEDKTKFFDLDYRGARFSFGYGSCPDLEDRAKLVELLEPGRIGVELSEELQLHPEQSTDAFVLYHPEAKYFNV

SEQ ID NO: 223 - protein, 1227 aa, Escherichia coli
MSSKVEQLRAQLNERILVLDGGMGTMIQSYRLNEADFRGERFADWPCDLKGNNDLLVLSKPEVIAAIHNAYFEAGADIIETNTFNSTTIAMADYQMESLSAEINFAAAKLARRCADEWTARTPEKPRYVAGVLGPTNRTASISPDVNDPAFRNITFDGLVAAYRESTKALVEGGADLILIETVFDTLNAKAAVFAVKTEFEALGVELPIMISGTITDASGRTLSGQTTEAFYNSLRHAEALTFGLNCALGPDELRQYVQELSRIAECYVTAHPNAGLPNAFGEYDLDADTMAKQIREWAQAGFLNIVGGCCGTTPQHIAAMSRAVEGLAPRKLPEIPVACRLSGLEPLNIGEDSLFVNVGERTNVTGSAKFKRLIKEEKYSEALDVARQQVENGAQIIDINMDEGMLDAEAAMVRFLNLIAGEPDIARVPIMIDSSKWDVIEKGLKCIQGKGIVNSISMKEGVDAFIHHAKLLRRYGAAVVVMAFDEQGQADTRARKIEICRRAYKILTEEVGFPPEDIIFDPNIFAVATGIEEHNNYAQDFIGACEDIKRELPHALISGGVSNVSFSFRGNDPVREAIHAVFLYYAIRNGMDMGIVNAGQLAIYDDLPAELRDAVEDVILNRRDDGTERLLELAEKYRGTKTDDTANAQQAEWRSWEVNKRLEYSLVKGITEFIEQDTEEARQQATRPIEVIEGPLMDGMNVVGDLFGEGKMFLPQVVKSARVMKQAVAYLEPFIEASKEQGKTNGKMVIATVKGDVHDIGKNIVGVVLQCNNYEIVDLGVMVPAEKILRTAKEVNADLIGLSGLITPSLDEMVNVAKEMERQGFTIPLLIGGATTSKAHTAVKIEQNYSGPTVYVQNASRTVGVVAALLSDTQRDDFVARTRKEYETVRIQHGRKKPRTPPVTLEAARDNDFAFDWQAYTPPVAHRLGVQEVEASIETLRNYIDWTPFFMTWSLAGKYPRILEDEVVGVEAQRLFKDANDMLDKLSAEKTLNPRGVVGLFPANRVGDDIEIYRDETRTHVINVSHHLRQQTEKTGFANYCLADFVAPKLSGKADYIGAFAVTGGLEEDALADAFEAQHDDYNKIMVKALADRLAEAFAEYLHERVRKVYWGYAPNENLSNEELIRENYQGIRPAPGYPACPEHTEKATIWELLEVEKHTGMKLTESFAMWPGASVSGWYFSHPDSKYYAVAQIQRDQVEDYARRKGMSVTEVERWLAPNLGYDAD

SEQ ID NO: 224 - protein, 745 aa, Coryne-bacterium glutamicum
MTSNFSSTVAGLPRIGAKRELKFALEGYWNGSIEGRELAQTARQLVNTASDSLSGLDSVPFAGRSYYDAMLDTAAILGVLPERFDDIADHENDGLPLWIDRYFGAARGTETLPAQAMTKWFDTNYHYLVPELSADTRFVLDASALIEDLRCQQVRGVNARPVLVGPLTFLSLARTTDGSNPLDHLPALFEVYERLIKSFDTEWVQIDEPALVTDVAPEVLEQVRAGYTTLAKRDGVFVNTYFGSGDQALNTLAGIGLGAIGVDLVTHGVTELAAWKGEELLVAGIVDGRNIWRTDLCAALASLKRLAARGPIAVSTSCSLLHVPYTLEAENIEPEVRDWLAFGSEKITEVKLLADALAGNIDAAAFDAASAAIASRRTSPRTAPITQELPGRSRGSFDTRVTLQEKSLELPALPTTTIGSFPQTPSIRSARARLRKESITLEQYEEAMREEIDLVIAKQEELGLDVLVHGEPERNDMVQYFSELLDGFLSTANGWVQSYGSRCVRPPVLFGNVSRPAPMTVKWFQYAQSLTQKHVKGMLTGPVTILAWSFVRDDQPLATTADQVALALRDEINDLIEAGAKIIQVDEPAIRELLPLRDVDKPAYLQWSVDSFRLATAGAPDDVQIHTHMCYSEFNEVISSVIALDADVTTIEAARSDMQVLAALKSSGFELGVGPGVWDIHSPRVPSAQEVDGLLEAALQSVDPRQLWVNPDCGLKTRGWPEVEASLKVLVESAKQAREKIGATI

SEQ ID NO: 225 - protein, 753 aa, Escherichia coli
MTILNHTLGFPRVGLRRELKKAQESYWAGNSTREELLAVGRELRARHWDQQKQAGIDLLPVGDFAWYDHVLTTSLLLGNVPPRHQNKDGSVDIDTLFRIGRGRAPTGEPAAAAEMTKWFNTNYHYMVPEFVKGQQFKLTWTQLLEEVDEALALGHKVKPVLLGPITYLWLGKVKGEQFDRLSLLNDILPVYQQVLAELAKRGIEWVQIDEPALVLELPQAWLDAYKPAYDALQGQVKLLLTTYFEGVTPNLDTITALPVQGLHVDLVHGKDDVAELHKRLPSDWLLSAGLINGRNVWRADLTEKYAQIKDIVGKRDLWVASSCSLLHSPIDLSVETRLDAEVKSWFAFALQKCHELALLRDALNSGDTAALAEWSAPIQARRHSTRVHNPAVEKRLAAITAQDSQRANVYEVRAEAQRARFKLPAWPTTTIGSFPQTTEIRTLRLDFKKGNLDANNYRTGIAEHIKQAIVEQERLGLDVLVHGEAERNDMVEYFGEHLDGFVFTQNGWVQSYGSRCVKPPIVIGDVSRPAPITVEWAKYAQSLTDKPVKGMLTGPVTILCWSFPREDVSRETIAKQIALALRDEVADLEAAGIGIIQIDEPALREGLPLRRSDWDAYLQWGVEAFRINAAVAKDDTQIHTHMCYCEFNDIMDSIAALDADVITIETSRSDMELLESFEEFDYPNEIGPGVYDIHSPNVPSVEWIEALLKKAAKRIPAERLWVNPDCGLKTRGWPETRAALANMVQAAQNLRRG

SEQ ID NO: 226 - protein, 434 aa, Coryne-bacterium glutamicum
MTDAHQADDVRYQPLNELDPEVAAAIAGELARQRDTLEMIASENFVPRSVLQAQGSVLTNKYAEGYPGRRYYGGCEQVDIIEDLARDRAKALFGAEFANVQPHSGAQANAAVLMTLAEPGDKIMGLSLAHGGHLTHGMKLNFSGKLYEVVAYGVDPETMRVDMDQVREIALKEQPKVIIAGWSAYPRHLDFEAFQSIAAEVGAKLWVDMAHFAGLVAAGLHPSPVPYSDVVSSTVHKTLGGPRSGIILAKQEYAKKLNSSVFPGQQGGPLMHAVAAKATSLKIAGTEQFRDRQARTLEGARILAERLTASDAKAAGVDVLTGGTDVHLVLADLRNSQMDGQQAEDLLHEVGITVNRNAVPFDPRPPMVTSGLRIGTPALATRGFDIPAFTEVADIIGTALANGKSADIESLRGRVAKLAADYPLYEGLEDWTIV

SEQ ID NO: 227 - protein, 417 aa, Escherichia coli
MLKREMNIADYDAELWQAMEQEKVRQEEHIELIASENYTSPRVMQAQGSQLTNKYAEGYPGKRYYGGCEYVDIVEQLAIDRAKELFGADYANVQPHSGSQANFAVYTALLEPGDTVLGMNLAHGGHLTHGSPVNFSGKLYNIVPYGIDATGHIDYADLEKQAKEHKPKMIIGGFSAYSGVVDWAKMREIADSIGAYLFVDMAHVAGLVAAGVYPNPVPHAHVVTTTTHKTLAGPRGGLILAKGGSEELYKKLNSAVFPGGQGGPLMHVIAGKAVALKEAMEPEFKTYQQQVAKNAKAMVEVFLERGYKVVSGGTDNHLFLVDLVDKNLTGKEADAALGRANITVNKNSVPNDPKSPFVTSGIRVGTPAITRRGFKEAEAKELAGWMCDVLDSINDEAVIERIKGKVLDICARYPVYA

SEQ ID NO: 228 - protein, 349 aa, Coryne-bacterium glutamicum
MVEVNKCQRQSQQNTLITLRYPGMSLTNIPASSQWAISDVLKRPSPGRVPFSVEFMPPRDDAAEERLYRAAEVFHDLGASFVSVTYGAGGSTRERTSRIARRLAKQPLTTLVHLTLVNHTREEMKAILREYLELGLTNLLALRGDPPGDPLGDWVSTDGGLNYASELIDLIKSTPEFREFDLGIASFPEGHFRAKTLEEDTKYTLAKLRGGAEYSITQMFFDVEDYLRLRDRLVAADPIHGAKPIIPGIMPITELRSVRRQVELSGAQLPSQLEESLVRAANGNEEANKDEIRKVGIEYSTNMAERLIAEGAEDLHFMTLNFTRATQEVLYNLGMAPAWGAEHGQDAVR

SEQ ID NO: 229 - protein, 296 aa, Escherichia coli
MSFFHASQRDALNQSLAEVQGQINVSFEFFPPRTSEMEQTLWNSIDRLSSLKPKFVSVTYGANSGERDRTHSIIKGIKDRTGLEAAPHLTCIDATPDELRTIARDYWNNGIRHIVALRGDLPPGSGKPEMYASDLVTLLKEVADFDISVAAYPEVHPEAKSAQADLLNLKRKVDAGANRAITQFFFDVESYLRFRDRCVSAGIDVEIIPGILPVSNFKQAKKFADMTNVRIPAWMAQMFDGLDDDAETRKLVGANIAMDMVKILSREGVKDFHFYTLNRAEMSYAICHTLGVRPGL

SEQ ID NO: 230 - protein, 188 aa, Coryne-bacterium glutamicum
MLSTIKMIREDLANAREHDPAARGDLENAVVYSGLHAIWAHRVANSWWKSGFRGPARVLAQFTRFLTGIEIHPGATIGRRFFIDHGMGIVIGETAEIGEGVMLYHGVTLGGQVLTQTKRHPTLCDNVTVGAGAKILGPITIGEGSAIGANAVVTKDVPAEHIAVGIPAVARPRGKTEKIKLVDPDYYI

SEQ ID NO: 231 - protein, 273 aa, Escherichia coli
MSCEELEIVWNNIKAEARTLADCEPMLASFYHATLLKHENLGSALSYMLANKLSSPIMPAIAIREVVEEAYAADPEMIASAACDIQAVRTRDPAVDKYSTPLLYLKGFHALQAYRIGHWLWNQGRRALAIFLQNQVSVTFQVDIHPAAKIGRGIMLDHATGIVVGETAVIENDVSILQSVTLGGTGKSGGDRHPKIREGVMIGAGAKILGNIEVGRGAKIGAGSVVLQPVPPHTTAAGVPARIVGKPDSDKPSMDMDQHFNGINHTFEYGDGI

SEQ ID NO: 232 - protein, 530 aa, Coryne-bacterium glutamicum
MSQNGRPVVLIADKLAQSTVDALGDAVEVRWVDGPNRPELLDAVKEADALLVRSATTVDAEVIAAAPNLKIVGRAGVGLDNVDIPAATEAGVMVANAPTSNIHSACEHAISLLLSTARQIPAADATLREGEWKRSSFNGVEIFGKTVGIVGFGHIGQLFAQRLAAFETTIVAYDPYANPARAAQLNVELVELDELMSRSDFVTIHLPKTKETAGMFDAQLLAKSKKGQIIINAARGGLVDEQALADAIESGHIRGAGFDVYSTEPCTDSPLFKLPQVVVTPHLGASTEEAQDRAGTDVADSVLKALAGEFVADAVNVSGGRVGEEVAVWMDLARKLGLLAGKLVDAAPVSIEVEARGELSSEQVDALGLSAVRGLFSGIIEESVTFVNAPRIAEERGLDISVKTNSESVTHRSVLQVKVITGSGASATVVGALTGLERVEKITRINGRGLDLRAEGLNLFLQYTDAPGALGTVGTKLGAAGINIEAAALTQAEKGDGAVLILRVESAVSEELEAEINAELGATSFQVDLD

SEQ ID NO: 233 - protein, 410 aa, Escherichia coli
MAKVSLEKDKIKFLLVEGVHQKALESLRAAGYTNIEFHKGALDDEQLKESIRDAHFIGLRSRTHLTEDVINAAEKLVAIGCFCIGTNQVDLDAAAKRGIPVFNAPFSNTRSVAELVIGELLLLLRGVPEANAKAHRGVWNKLAAGSFEARGKKLGIIGYGHIGTQLGILAESLGMYVYFYDIENKLPLGNATQVQHLSDLLNMSDVVSLHVPENPSTKNMMGAKEISLMKPGSLLINASRGTVVDIPALCDALASKHLAGAAIDVFPTEPATNSDPFTSPLCEFDNVLLTPHIGGSTQEAQENIGLEVAGKLIKYSDNGSTLSAVNFPEVSLPLHGGRRLMHIHENRPGVLTALNKIFAEQGVNIAAQYLQTSAQMGYVVIDIEADEDVAEKALQAMKAIPGTIRARLLY

SEQ ID NO: 234 - protein, 233 aa, Coryne-bacterium glutamicum
MEIFITGLLLGASLLLSIGPQNVLVIKQGIKREGLIAVLLVCLISDVFLFIAGTLGVDLLSNAAPIVLDIMRWGGIAYLLWFAVMAAKDAMTNKVEAPQIIEETEPTVPDDTPLGGSAVATDTRNRVRVEVSVDKQRVWVKPMLMAIVLTWLNPNAYLDAFVFIGGVGAQYGDTGRWIFAAGAFAASLIWFPLVGFGAAALSRPLSSPKVWRWINVVVAVVMTALAIKLMLMG

SEQ ID NO: 235 - protein, 386 aa, Coryne-bacterium glutamicum
MSFDPNTQGFSTASIHAGYEPDDYYGSINTPIYASTTFAQNAPNELRKGYEYTRVGNPTIVALEQTVAALEGAKYGRAFSSGMAATDILFRIILKPGDHIVLGNDAYGGTYRLIDTVFTAWGVEYTVVDTSVVEEVKAAIKDNTKLIWVETPTNPALGITDIEAVAKLTEGTNAKLVVDNTFASPYLQQPLKLGAHAVLHSTTKYIGGHSDVVGGLVVTNDQEMDEELLFMQGGIGPIPSVFDAYLTARGLKTLAVRMDRHCDNAEKIAEFLDSRPEVSTVLYPGLKNHPGHEVAAKQMKRFGGMISVRFAGGEEAAKKFCTSTKLICLAESLGGVESLLEHPATMTHQSAAGSQLEVPRDLVRISIGIEDIEDLLADVEQALNNL

SEQ ID NO: 236 - protein, 386 aa, Escherichia coli
MTRKQATIAVRSGLNDDEQYGCVVPPIHLSSTYNFTGFNEPRAHDYSRRGNPTRDVVQRALAELEGGAGAVLTNTGMSAIHLVTTVFLKPGDLLVAPHDCYGGSYRLFDSLAKRGCYRVLFVDQGDEQALRAALAEKPKLVLVESPSNPLLRVVDIAKICHLAREVGAVSVVDNTFLSPALQNPLALGADLVLHSCTKYLNGHSDVVAGVVIAKDPDVVTELAWWANNIGVTGGAFDSYLLLRGLRTLVPRMELAQRNAQAIVKYLQTQPLVKKLYHPSLPENQGHEIAARQQKGFGAMLSFELDGDEQTLRRFLGGLSLFTLAESLGGVESLISHAATMTHAGMAPEARAAAGISETLLRISTGIEDGEDLIADLENGFRAANKG

SEQ ID NO: 237 - protein, 211 aa, Escherichia coli
MFSYYFQGLALGAAMILPLGPQNAFVMNQGIRRQYHIMIALLCAISDLVLICAGIFGGSALLMQSPWLLALVTWGGVAFLLWYGFGAFKTAMSSNIELASAEVMKQGRWKIIATMLAVTWLNPHVYLDTFVVLGSLGGQLDVEPKRWFALGTISASFLWFFGLALLAAWLAPRLRTAKAQRIINLVVGCVMWFIALQLARDGIAHAQALFS

SEQ ID NO: 238 - DNA, 1263 bp, Coryne-bacterium glutamicum
gtggccctggtcgtacagaaatatggcggttcctcgcttgagagtgcggaacgcattagaaacgtcgctgaacggatcgttgccaccaagaaggctggaaatgatgtcgtggttgtctgctccgcaatgggagacaccacggatgaacttctagaacttgcagcggcagtgaatcccgttccgccagctcgtgaaatggatatgctcctgactgctggtgagcgtatttctaacgctctcgtcgccatggctattgagtcccttggcgcagaagcccaatctttcacgggctctcaggctggtgtgctcaccaccgagcgccacggaaacgcacgcattgttgatgtcactccaggtcgtgtgcgtgaagcactcgatgagggcaagatctgcattgttgctggtttccagggtgttaataaagaaacccgcgatgtcaccacgttgggtcgtggtggttctgacaccactgcagttgcgttggcagctgctttgaacgctgatgtgtgtgagatttactcggacgttgacggtgtgtataccgctgacccgcgcatcgttcctaatgcacagaagctggaaaagctcagcttcgaagaaatgctggaacttgctgctgttggctccaagattttggtgctgcgcagtgttgaatacgctcgtgcattcaatgtgccacttcgcgtacgctcgtcttatagtaatgatcccggcactttgattgccggctctatggaggatattcctgtggaagaagcagtccttaccggtgtcgcaaccgacaagtccgaagccaaagtaaccgttctgggtatttccgataagccaggcgaggctgcgaaggttttccgtgcgttggctgatgcagaaatcaacattgacatggttctgcagaacgtctcttctgtagaagacggcaccaccgacatcaccttcacctgccctcgttccgacggccgccgcgcgatggagatcttgaagaagcttcaggttcagggcaactggaccaatgtgctttacgacgaccaggtcggcaaagtctccctcgtgggtgctggcatgaagtctcacccaggtgttaccgcagagttcatggaagctctgcgcgatgtcaacgtgaacatcgaattgatttccacctctgagattcgtatttccgtgctgatccgtgaagatgatctggatgctgctgcacgtgcattgcatgagcagttccagctgggcggcgaagacgaagccgtcgtttatgcaggcaccggacgc

SEQ ID NO: 239 - DNA, 1350 bp, Escherichia coli
atgtctgaaattgttgtctccaaatttggcggtaccagcgtagccgattttgacgccatgaaccgcagcgctgatattgtgctttctgatgccaacgtgcgtttagttgtcctctcggcttctgctggtatcactaatctgctggtcgctttagctgaaggactggaaccttgcgagcgattcgaaaaactcgacgctatccgcaacatccagtttgccattctggaacgtctgcgttacccgaacgttatccgtgaagagattgaacgtctgctggagaacattactgttctggcagaagcggcggcgctggcaacgtctccggcgctgacagatgagctggtcagccacggcgagctgatgtcgaccctgctgtttgttgagatcctgcgcgaacgcgatgttcaggcacagtggtttgatgtgcgtaaagtgatgcgtaccaacgaccgatttggtcgtgcagagccagatatagccgcgctggcggaactggccgcgctgcagctgctcccacgtctcaatgaaggcttagtgatcacccagggatttatcggtagcgaaaataaaggtcgtacaacgacgcttggccgtggaggcagcgattatacggcagccttgctggcggaggctttacacgcatctcgtgttgatatctggaccgacgtcccgggcatctacaccaccgatccacgcgtagtttccgcagcaaaacgcattgatgaaatcgcgtttgccgaagcggcagagatggcaacttttggtgcaaaagtactgcatccggcaacgttgctacccgcagtacgcagcgatatcccggtctttgtcggctccagcaaagacccacgcgcaggtggtacgctggtgtgcaataaaactgaaaatccgccgctgttccgcgctctggcgcttcgtcgcaatcagactctgctcactttgcacagcctgaatatgctgcattctcgcggtttcctcgcggaagttttcggcatcctcgcgcggcataatatttcggtagacttaatcaccacgtcagaagtgagcgtggcattaacccttgataccaccggttcaacctccactggcgatacgttgctgacacaatctctgctgatggagctttccgcactgtgtcgggtggaggtggaagaaggtctggcgctggtcgcgttgattggcaatgacctgtcaaaagcgtgcgccgttggcaaagaggtattcggcgtactggaaccgttcaacattcgcatgatttgttatggcgcatccagccataacctgtgcttcctggtgcccggcgaagatgccgagcaggtggtgcaaaaactgcatagtaatttgtttgagtaa

SEQ ID NO: 240 - DNA, 1035 bp, Coryne-bacterium glutamicum
atgaccaccatcgcagttgttggtgcaaccggccaggtcggccaggttatgcgcacccttttggaagagcgcaatttcccagctgacactgttcgtttctttgcttccccacgttccgcaggccgtaagattgaattccgtggcacggaaatcgaggtagaagacattactcaggcaaccgaggagtccctcaaggacatcgacgttgcgttgttctccgctggaggcaccgcttccaagcagtacgctccactgttcgctgctgcaggcgcgactgttgtggataactcttctgcttggcgcaaggacgacgaggttccactaatcgtctctgaggtgaacccttccgacaaggattccctggtcaagggcattattgcgaaccctaactgcaccaccatggctgcgatgccagtgctgaagccacttcacgatgccgctggtcttgtaaagcttcacgtttcctcttaccaggctgtttccggttctggtcttgcaggtgtggaaaccttggcaaagcaggttgctgcagttggagaccacaacgttgagttcgtccatgatggacaggctgctgacgcaggcgatgtcggaccttatgtttcaccaatcgcttacaacgtgctgccattcgccggaaacctcgtcgatgacggcaccttcgaaaccgatgaagagcagaagctgcgcaacgaatcccgcaagattctcggtctcccagacctcaaggtctcaggcacctgcgttcgcgtgccggttttcaccggccacacgctgaccattcacgccgaattcgacaaggcaatcaccgtggaccaggcgcaggagatcttgggtgccgcttcaggcgtcaagcttgtcgacgtcccaaccccacttgcagctgccggcattgacgaatccctcgttggacgcatccgtcaggactccactgtcgacgataaccgcggtctggttctcgtcgtatctggcgacaacctccgcaagggtgctgcgctaaacaccatccagatcgctgagctgctggttaagtaa

SEQ ID NO: 241 - DNA, 1101 bp, Escherichia coli
atgaaaaatgttggttttatcggctggcgcggtatggtcggctccgttctcatgcaacgcatggttgaagagcgcgacttcgacgccattcgccctgtcttcttttctacttctcagcttggccaggctgcgccgtcttttggcggaaccactggcacacttcaggatgcctttgatctggaggcgctaaaggccctcgatatcattgtgacctgtcagggcggcgattataccaacgaaatctatccaaagcttcgtgaaagcggatggcaaggttactggattgacgcagcatcgtctctgcgcatgaaagatgacgccatcatcattcttgaccccgtcaatcaggacgtcattaccgacggattaaataatggcatcaggacttttgttggcggtaactgtaccgtaagcctgatgttgatgtcgttgggtggtttattcgccaatgatcttgttgattgggtgtccgttgcaacctaccaggccgcttccggcggtggtgcgcgacatatgcgtgagttattaacccagatgggccatctgtatggccatgtggcagatgaactcgcgaccccgtcctctgctattctcgatatcgaacgcaaagtcacaaccttaacccgtagcggtgagctgccggtggataactttggcgtgccgctggcgggtagcctgattccgtggatcgacaaacagctcgataacggtcagagccgcgaagagtggaaagggcaggcggaaaccaacaagatcctcaacacatcttccgtaattccggtagatggtttatgtgtgcgtgtcggggcattgcgctgccacagccaggcattcactattaaattgaaaaaagatgtgtctattccgaccgtggaagaactgctggctgcgcacaatccgtgggcgaaagtcgttccgaacgatcgggaaatcactatgcgtgagctaaccccagctgccgttaccggcacgctgaccacgccggtaggccgcctgcgtaagctgaatatgggaccagagttcctgtcagcctttaccgtgggcgaccagctgctgtggggggccgcggagccgctgcgtcggatgcttcgtcaactggcg

SEQ ID NO: 242 - DNA, 2757 bp, Coryne-bacterium glutamicum
atgactgattttttacgcgatgacatcaggttcctcggtcaaatcctcggtgaggtaattgcggaacaagaaggccaggaggtttatgaactggtcgaacaagcgcgcctgacttcttttgatatcgccaagggcaacgccgaaatggatagcctggttcaggttttcgacggcattactccagccaaggcaacaccgattgctcgcgcattttcccacttcgctctgctggctaacctggcggaagacctctacgatgaagagcttcgtgaacaggctctcgatgcaggcgacacccctccggacagcactcttgatgccacctggctgaaactcaatgagggcaatgttggcgcagaagctgtggccgatgtgctgcgcaatgctgaggtggcgccggttctgactgcgcacccaactgagactcgccgccgcactgtttttgatgcgcaaaagtggatcaccacccacatgcgtgaacgccacgctttgcagtctgcggagcctaccgctcgtacgcaaagcaagttggatgagatcgagaagaacatccgccgtcgcatcaccattttgtggcagaccgcgttgattcgtgtggcccgcccacgtatcgaggacgagatcgaagtagggctgcgctactacaagctgagccttttggaagagattccacgtatcaaccgtgatgtggctgttgagcttcgtgagcgtttcggcgagggtgttcctttgaagcccgtggtcaagccaggttcctggattggtggagaccacgacggtaacccttatgtcaccgcggaaacagttgagtattccactcaccgcgctgcggaaaccgtgctcaagtactatgcacgccagctgcattccctcgagcatgagctcagcctgtcggaccgcatgaataaggtcaccccgcagctgcttgcgctggcagatgcagggcacaacgacgtgccaagccgcgtggatgagccttatcgacgcgccgtccatggcgttcgcggacgtatcctcgcgacgacggccgagctgatcggcgaggacgccgttgagggcgtgtggttcaaggtctttactccatacgcatctccggaagaattcttaaacgatgcgttgaccattgatcattctctgcgtgaatccaaggacgttctcattgccgatgatcgtttgtctgtgctgatttctgccatcgagagctttggattcaacctttacgcactggatctgcgccaaaactccgaaagctacgaggacgtcctcaccgagcttttcgaacgcgcccaagtcaccgcaaactaccgcgagctgtctgaagcagagaagcttgaggtgctgctgaaggaactgcgcagccctcgtccgctgatcccgcacggttcagatgaatacagcgaggtcaccgaccgcgagctcggcatcttccgcaccgcgtcggaggctgttaagaaattcgggccacggatggtgcctcactgcatcatctccatggcatcatcggtcaccgatgtgctcgagccgatggtgttgctcaaggaattcggactcatcgcagccaacggcgacaacccacgcggcaccgtcgatgtcatcccactgttcgaaaccatcgaagatctccaggccggcgccggaatcctcgacgaactgtggaaaattgatctctaccgcaactacctcctgcagcgcgacaacgtccaggaagtcatgctcggttactccgattccaacaaggatggcggatatttctccgcaaactgggcgctttacgacgcggaactgcagctcgtcgaactatgccgatcagccggggtcaagcttcgcctgttccacggccgtggtggcaccgtcggccgcggtggcggaccttcctacgacgcgattcttgcccagcccaggggggctgtccaaggttccgtgcgcatcaccgagcagggcgagatcatctccgctaagtacggcaaccccgaaaccgcgcgccgaaacctcgaagccctggtctcagccacgcttgaggcatcgcttctcgacgtctccgaactcaccgatcaccaacgcgcgtacgacatcatgagtgagatctctgagctcagcttgaagaagtacgcctccttggtgcacgaggatcaaggcttcatcgattacttcacccagtccacgccgctgcaggagattggatccctcaacatcggatccaggccttcctcacgcaagcagacctcctcggtggaagatttgcgagccatcccatgggtgctcagctggtcacagtctcgtgtcatgctgccaggctggtttggtgtcggaaccgcattagagcagtggattggcgaaggggagcaggccacccaacgcattgccgagctgcaaacactcaatgagtcctggccatttttcacctcagtgttggataacatggctcaggtgatgtccaaggcagagctgcgtttggcaaagctctacgcagacctgatcccagatacggaagtagccgagcgagtctattccgtcatccgcgaggagtacttcctgaccaagaagatgttctgcgtaatcaccggctctgatgatctgcttgatgacaacccacttctcgcacgctctgtccagcgccgatacccctacctgcttccactcaacgtgatccaggtagagatgatgcgacgctaccgaaaaggcgaccaaagcgagcaagtgtcccgcaacattcagctgaccatgaacggtctttccactgcgctgcgcaactccggc

SEQ ID NO: 243 - DNA, 2652 bp, Escherichia coli
atgaacgaacaatattccgcattgcgtagtaatgtcagtatgctcggcaaagtgctgggagaaaccatcaaggatgcgttgggagaacacattcttgaacgcgtagaaactatccgtaagttgtcgaaatcttcacgcgctggcaatgatgctaaccgccaggagttgctcaccaccttacaaaatttgtcgaacgacgagctgctgcccgttgcgcgtgcgtttagtcagttcctgaacctggccaacaccgccgagcaataccacagcatttcgccgaaaggcgaagctgccagcaacccggaagtgatcgcccgcaccctgcgtaaactgaaaaaccagccggaactgagcgaagacaccatcaaaaaagcagtggaatcgctgtcgctggaactggtcctcacggctcacccaaccgaaattacccgtcgtacactgatccacaaaatggtggaagtgaacgcctgtttaaaacagctcgataacaaagatatcgctgactacgaacacaaccagctgatgcgtcgcctgcgccagttgatcgcccagtcatggcataccgatgaaatccgtaagctgcgtccaagcccggtagatgaagccaaatggggctttgccgtagtggaaaacagcctgtggcaaggcgtaccaaattacctgcgcgaactgaacgaacaactggaagagaacctcggctacaaactgcccgtcgaatttgttccggtccgttttacttcgtggatgggcggcgaccgcgacggcaacccgaacgtcactgccgatatcacccgccacgtcctgctactcagccgctggaaagccaccgatttgttcctgaaagatattcaggtgctggtttctgaactgtcgatggttgaagcgacccctgaactgctggcgctggttggcgaagaaggtgccgcagaaccgtatcgctatctgatgaaaaacctgcgttctcgcctgatggcgacacaggcatggctggaagcgcgcctgaaaggcgaagaactgccaaaaccagaaggcctgctgacacaaaacgaagaactgtgggaaccgctctacgcttgctaccagtcacttcaggcgtgtggcatgggtattatcgccaacggcgatctgctcgacaccctgcgccgcgtgaaatgtttcggcgtaccgctggtccgtattgatatccgtcaggagagcacgcgtcataccgaagcgctgggcgagctgacccgctacctcggtatcggcgactacgaaagctggtcagaggccgacaaacaggcgttcctgatccgcgaactgaactccaaacgtccgcttctgccgcgcaactggcaaccaagcgccgaaacgcgcgaagtgctcgatacctgccaggtgattgccgaagcaccgcaaggctccattgccgcctacgtgatctcgatggcgaaaacgccgtccgacgtactggctgtccacctgctgctgaaagaagcgggtatcgggtttgcgatgccggttgctccgctgtttgaaaccctcgatgatctgaacaacgccaacgatgtcatgacccagctgctcaatattgactggtatcgtggcctgattcagggcaaacagatggtgatgattggctattccgactcagcaaaagatgcgggagtgatggcagcttcctgggcgcaatatcaggcacaggatgcattaatcaaaacctgcgaaaaagcgggtattgagctgacgttgttccacggtcgcggcggttccattggtcgcggcggcgcacctgctcatgcggcgctgctgtcacaaccgccaggaagcctgaaaggcggcctgcgcgtaaccgaacagggcgagatgatccgctttaaatatggtctgccagaaatcaccgtcagcagcctgtcgctttataccggggcgattctggaagccaacctgctgccaccgccggagccgaaagagagctggcgtcgcattatggatgaactgtcagtcatctcctgcgatgtctaccgcggctacgtacgtgaaaacaaagattttgtgccttacttccgctccgctacgccggaacaagaactgggcaaactgccgttgggttcacgtccggcgaaacgtcgcccaaccggcggcgtcgagtcactacgcgccattccgtggatcttcgcctggacgcaaaaccgtctgatgctccccgcctggctgggtgcaggtacggcgctgcaaaaagtggtcgaagacggcaaacagagcgagctggaggctatgtgccgcgattggccattcttctcgacgcgtctcggcatgctggagatggtcttcgccaaagcagacctgtggctggcggaatactatgaccaacgcctggtagacaaagcactgtggccgttaggtaaagagttacgcaacctgcaagaagaagacatcaaagtggtgctggcgattgccaacgattcccatctgatggccgatctgccgtggattgcagagtctattcagctacggaatatttacaccgacccgctgaacgtattgcaggccgagttgctgcaccgctcccgccaggcagaaaaagaaggccaggaaccggatcctcgcgtcgaacaagcgttaatggtcactattgccgggattgcggcaggtatgcgtaataccggctaa

SEQ ID NO: 244 - DNA, 3423 bp, Coryne-bacterium glutamicum
gtgtcgactcacacatcttcaacgcttccagcattcaaaaagatcttggtagcaaaccgcggcgaaatcgcggtccgtgctttccgtgcagcactcgaaaccggtgcagccacggtagctatttacccccgtgaagatcggggatcattccaccgctcttttgcttctgaagctgtccgcattggtaccgaaggctcaccagtcaaggcgtacctggacatcgatgaaattatcggtgcagctaaaaaagttaaagcagatgccatttacccgggatacggcttcctgtctgaaaatgcccagcttgcccgcgagtgtgcggaaaacggcattacttttattggcccaaccccagaggttcttgatctcaccggtgataagtctcgcgcggtaaccgccgcgaagaaggctggtctgccagttttggcggaatccaccccgagcaaaaacatcgatgagatcgttaaaagcgctgaaggccagacttaccccatctttgtgaaggcagttgccggtggtggcggacgcggtatgcgttttgttgcttcacctgatgagcttcgcaaattagcaacagaagcatctcgtgaagctgaagcggctttcggcgatggcgcggtatatgtcgaacgtgctgtgattaaccctcagcatattgaagtgcagatccttggcgatcacactggagaagttgtacacctttatgaacgtgactgctcactgcagcgtcgtcaccaaaaagttgtcgaaattgcgccagcacagcatttggatccagaactgcgtgatcgcatttgtgcggatgcagtaaagttctgccgctccattggttaccagggcgcgggaaccgtggaattcttggtcgatgaaaagggcaaccacgtcttcatcgaaatgaacccacgtatccaggttgagcacaccgtgactgaagaagtcaccgaggtggacctggtgaaggcgcagatgcgcttggctgctggtgcaaccttgaaggaattgggtctgacccaagataagatcaagacccacggtgcagcactgcagtgccgcatcaccacggaagatccaaacaacggcttccgcccagataccggaactatcaccgcgtaccgctcaccaggcggagctggcgttcgtcttgacggtgcagctcagctcggtggcgaaatcaccgcacactttgactccatgctggtgaaaatgacctgccgtggttccgactttgaaactgctgttgctcgtgcacagcgcgcgttggctgagttcaccgtgtctggtgttgcaaccaacattggtttcttgcgtgcgttgctgcgggaagaggacttcacttccaagcgcatcgccaccggattcattgccgatcacccgcacctccttcaggctccacctgctgatgatgagcagggacgcatcctggattacttggcagatgtcaccgtgaacaagcctcatggtgtgcgtccaaaggatgttgcagctcctatcgataagctgcctaacatcaaggatctgccactgccacgcggttcccgtgaccgcctgaagcagcttggcccagccgcgtttgctcgtgatctccgtgagcaggacgcactggcagttactgataccaccttccgcgatgcacaccagtctttgcttgcgacccgagtccgctcattcgcactgaagcctgcggcagaggccgtcgcaaagctgactcctgagcttttgtccgtggaggcctggggcggcgcgacctacgatgtggcgatgcgtttcctctttgaggatccgtgggacaggctcgacgagctgcgcgaggcgatgccgaatgtaaacattcagatgctgcttcgcggccgcaacaccgtgggatacaccccgtacccagactccgtctgccgcgcgtttgttaaggaagctgccagctccggcgtggacatcttccgcatcttcgacgcgcttaacgacgtctcccagatgcgtccagcaatcgacgcagtcctggagaccaacaccgcggtagccgaggtggctatggcttattctggtgatctctctgatccaaatgaaaagctctacaccctggattactacctaaagatggcagaggagatcgtcaagtctggcgctcacatcttggccattaaggatatggctggtctgcttcgcccagctgcggtaaccaagctggtcaccgcactgcgccgtgaattcgatctgccagtgcacgtgcacacccacgacactgcgggtggccagctggcaacctactttgctgcagctcaagctggtgcagatgctgttgacggtgcttccgcaccactgtctggcaccacctcccagccatccctgtctgccattgttgctgcattcgcgcacacccgtcgcgataccggtttgagcctcgaggctgtttctgacctcgagccgtactgggaagcagtgcgcggactgtacctgccatttgagtctggaaccccaggcccaaccggtcgcgtctaccgccacgaaatcccaggcggacagttgtccaacctgcgtgcacaggccaccgcactgggccttgcggatcgtttcgaactcatcgaagacaactacgcagccgttaatgagatgctgggacgcccaaccaaggtcaccccatcctccaaggttgttggcgacctcgcactccacctcgttggtgcgggtgtggatccagcagactttgctgccgatccacaaaagtacgacatcccagactctgtcatcgcgttcctgcgcggcgagcttggtaaccctccaggtggctggccagagccactgcgcacccgcgcactggaaggccgctccgaaggcaaggcacctctgacggaagttcctgaggaagagcaggcgcacctcgacgctgatgattccaaggaacgtcgcaatagcctcaaccgcctgctgttcccgaagccaaccgaagagttcctcgagcaccgtcgccgcttcggcaacacctctgcgctggatgatcgtgaattcttctacggcctggtcgaaggccgcgagactttgatccgcctgccagatgtgcgcaccccactgcttgttcgcctggatgcgatctctgagccagacgataagggtatgcgcaatgttgtggccaacgtcaacggccagatccgcccaatgcgtgtgcgtgaccgctccgttgagtctgtcaccgcaaccgcagaaaaggcagattcctccaacaagggccatgttgctgcaccattcgctggtgttgtcaccgtgactgttgctgaaggtgatgaggtcaaggctggagatgcagtcgcaatcatcgaggctatgaagatggaagcaacaatcactgcttctgttgacggcaaaatcgatcgcgttgtggttcctgctgcaacgaaggtggaaggtggcgacttgatcgtcgtcgtttcctaa

SEQ ID NO: 245 - DNA, 906 bp, Coryne-bacterium glutamicum; identical to SEQ ID NO: 128

SEQ ID NO: 246 - DNA, 879 bp, Escherichia coli; identical to SEQ ID NO: 129

SEQ ID NO: 247 - DNA, 1338 bp, Coryne-bacterium glutamicum
atgacctcagcatctgccccaagctttaaccccggcaagggtcccggctcagcagtcggaattgcccttttaggattcggaacagtcggcactgaggtgatgcgtctgatgaccgagtacggtgatgaacttgcgcaccgcattggtggcccactggaggttcgtggcattgctgtttctgatatctcaaagccacgtgaaggcgttgcacctgagctgctcactgaggacgcttttgcactcatcgagcgcgaggatgttgacatcgtcgttgaggttatcggcggcattgagtacccacgtgaggtagttctcgcagctctgaaggccggcaagtctgttgttaccgccaataaggctcttgttgcagctcactctgctgagcttgctgatgcagcggaagccgcaaacgttgacctgtacttcgaggctgctgttgcaggcgcaattccagtggttggcccactgcgtcgctccctggctggcgatcagatccagtctgtgatgggcatcgttaacggcaccaccaacttcatcttggacgccatggattccaccggcgctgactatgcagattctttggctgaggcaactcgtttgggttacgccgaagctgatccaactgcagacgtcgaaggccatgacgccgcatccaaggctgcaattttggcatccatcgctttccacacccgtgttaccgcggatgatgtgtactgcgaaggtatcagcaacatcagcgctgccgacattgaggcagcacagcaggcaggccacaccatcaagttgttggccatctgtgagaagttcaccaacaaggaaggaaagtcggctatttctgctcgcgtgcacccgactctattacctgtgtcccacccactggcgtcggtaaacaagtcctttaatgcaatctttgttgaagcagaagcagctggtcgcctgatgttctacggaaacggtgcaggtggcgcgccaaccgcgtctgctgtgcttggcgacgtcgttggtgccgcacgaaacaaggtgcacggtggccgtgctccaggtgagtccacctacgctaacctgccgatcgctgatttcggtgagaccaccactcgttaccacctcgacatggatgtggaagatcgcgtgggggttttggctgaattggctagcctgttctctgagcaaggaatctccctgcgtacaatccgacaggaagagcgcgatgatgatgcacgtctgatcgtggtcacccactctgcgctggaatctgatctttcccgcaccgttgaactgctgaaggctaagcctgttgttaaggcaatcaacagtgtgatccgcctcgaaagggactaa

SEQ ID NO: 248 - DNA, 2430 bp, Escherichia coli
agtgtgattgcgcaggcaggggcgaaaggtcgtcagctgcataaatttggtggcagtagtctggctgatgtgaagtgttatttgcgtgtcgcgggcattatggcggagtactctcagcctgacgatatgatggtggtttccgccgccggtagcaccactaaccggttgattagctggttgaaactaagccagaccgatcgtctctctgcgcatcaggttcaacaaacgctgcgtcgctatcagtgcgatctgattagcggtctgctacccgctgaagaagccgatagcctcattagcgcttttgtcagcgaccttgagcgcctggcggcgctgctcgacagcggtattaacgacgcagtgtatgcggaagtggtgggccacggggaagtatggtcggcacgtctgatgtctgcggtacttaatcaacaagggctgccagcggcctggcttgatgcccgcgagtttttacgcgctgaacgcgccgcacaaccgcaggttgatgaagggctttcttacccgttgctgcaacagctgctggtgcaacatccgggcaaacgtctggtggtgaccggatttatcagccgcaacaacgccggtgaaacggtgctgctggggcgtaacggttccgactattccgcgacacaaatcggtgcgctggcgggtgtttctcgcgtaaccatctggagcgacgtcgccggggtatacagtgccgacccgcgtaaagtgaaagatgcctgcctgctgccgttgctgcgtctggatgaggccagcgaactggcgcgcctggcggctcccgttcttcacgcccgtactttacagccggtttctggcagcgaaatcgacctgcaactgcgctgtagctacacgccggatcaaggttccacgcgcattgaacgcgtgctggcctccggtactggtgcgcgtattgtcaccagccacgatgatgtctgtttgattgagtttcaggtgcccgccagtcaggatttcaaactggggcataaagagatcgaccaaatcctgaaacgcgcgcaggtacgcccgctggcggttggcgtacataacgatcgccagttgctgcaattttgctacacctcagaagtggccgacagtgcgctgaaaatcctcgacgaagcgggattacctggcgaactgcgcctgcgtcaggggctggcgctggtggcgatggtcggtgcaggcgtcacccgtaacccgctgcattgccaccgcttctggcagcaactgaaaggccagccggtcgaatttacctggcagtccgatgacggcatcagcctggtggcagtactgcgcaccggcccgaccgaaagcctgattcaggggctgcatcagtccgtcttccgcgcagaaaaacgcatcggcctggtattgttcggtaagggcaatatcggttcccgttggctggaactgttcgcccgtgagcagagcacgctttcggcacgtaccggctttgagtttgtgctggcaggtgtggtggacagccgccgcagcctgttgagctatgacgggctggacgccagccgcgcgttagccttcttcaacgatgaagcggttgagcaggatgaagagtcgttgttcctgtggatgcgcgcccatccgtatgatgatttagtggtgctggacgttaccgccagccagcagcttgctgatcagtatcttgatttcgccagccacggtttccacgttatcagcgccaacaaactggcgggagccagcgacagcaataaatatcgccagatccacgacgccttcgaaaaaaccgggcgtcactggctgtacaatgccaccgtcggtgcgggcttgccgatcaaccacaccgtgcgcgatctgatcgacagcggcgatactattttgtcgatcagcgggatcttctccggcacgctctcctggctgttcctgcaattcgacggtagcgtgccgtttaccgagctggtggatcaggcgtggcagcagggcttaaccgaacctgacccgcgtgacgatctctctggcaaagacgtgagtcgcaagctggtgattctggcgcgtgaagcaggttacaacatcgaaccggatcaggtacgtgtggaatcgctggtgcctgctcattgcgaaggcggcagcatcgaccatttctttgaaaatggcgatgaactgaacgagcagatggtgcaacggctggaagcggcccgcgaaatggggctggtgctgcgctacgtggcgcgtttcgatgccaacggtaaagcgcgtgtaggcgtggaagcggtgcgtgaagatcatccgttgcgatcactgctgccgtgcgataacgtctttgccatcgaaagccgctggtatcgcgataaccctctggtgatccgcggacctggcgctgggcgcgacgtcaccgccggggcgattcagtcggatatcaaccggctggcacagttgttgtaa

SEQ ID NO: 249 - DNA, 2463 bp, Escherichia coli
atgcgagtgttgaagttcggcggtacatcagtggcaaatgcagaacgttttctgcgtgttgccgatattctggaaagcaatgccaggcaggggcaggtggccaccgtcctctctgcccccgccaaaatcaccaaccacctggtggcgatgattgaaaaaaccattagcggccaggatgctttacccaatatcagcgatgccgaacgtatttttgccgaacttttgacgggactcgccgccgcccagccggggttcccgctggcgcaattgaaaactttcgtcgatcaggaatttgcccaaataaaacatgtcctgcatggcattagtttgttggggcagtgcccggatagcatcaacgctgcgctgatttgccgtggcgagaaaatgtcgatcgccattatggccggcgtattagaagcgcgcggtcacaacgttactgttatcgatccggtcgaaaaactgctggcagtggggcattacctcgaatctaccgtcgatattgctgagtccacccgccgtattgcggcaagccgcattccggctgatcacatggtgctgatggcaggtttcaccgccggtaatgaaaaaggcgaactggtggtgcttggacgcaacggttccgactactctgctgcggtgctggctgcctgtttacgcgccgattgttgcgagatttggacggacgttgacggggtctatacctgcgacccgcgtcaggtgcccgatgcgaggttgttgaagtcgatgtcctaccaggaagcgatggagctttcctacttcggcgctaaagttcttcacccccgcaccattacccccatcgcccagttccagatcccttgcctgattaaaaataccggaaatcctcaagcaccaggtacgctcattggtgccagccgtgatgaagacgaattaccggtcaagggcatttccaatctgaataacatggcaatgttcagcgtttctggtccggggatgaaagggatggtcggcatggcggcgcgcgtctttgcagcgatgtcacgcgcccgtatttccgtggtgctgattacgcaatcatcttccgaatacagcatcagtttctgcgttccacaaagcgactgtgtgcgagctgaacgggcaatgcaggaagagttctacctggaactgaaagaaggcttactggagccgctggcagtgacggaacggctggccattatctcggtggtaggtgatggtatgcgcaccttgcgtgggatctcggcgaaattctttgccgcactggcccgcgccaatatcaacattgtcgccattgctcagggatcttctgaacgctcaatctctgtcgtggtaaataacgatgatgcgaccactggcgtgcgcgttactcatcagatgctgttcaataccgatcaggttatcgaagtgtttgtgattggcgtcggtggcgttggcggtgcgctgctggagcaactgaagcgtcagcaaagctggctgaagaataaacatatcgacttacgtgtctgcggtgttgccaactcgaaggctctgctcaccaatgtacatggccttaatctggaaaactggcaggaagaactggcgcaagccaaagagccgtttaatctcgggcgcttaattcgcctcgtgaaagaatatcatctgctgaacccggtcattgttgactgcacttccagccaggcagtggcggatcaatatgccgacttcctgcgcgaaggtttccacgttgtcacgccgaacaaaaaggccaacacctcgtcgatggattactaccatcagttgcgttatgcggcggaaaaatcgcggcgtaaattcctctatgacaccaacgttggggctggattaccggttattgagaacctgcaaaatctgctcaatgcaggtgatgaattgatgaagttctccggcattctttctggttcgctttcttatatcttcggcaagttagacgaaggcatgagtttctccgaggcgaccacgctggcgcgggaaatgggttataccgaaccggacccgcgagatgatctttctggtatggatgtggcgcgtaaactattgattctcgctcgtgaaacgggacgtgaactggagctggcggatattgaaattgaacctgtgctgcccgcagagtttaacgccgagggtgatgttgccgcttttatggcgaatctgtcacaactcgacgatctctttgccgcgcgcgtggcgaaggcccgtgatgaaggaaaagttttgcgctatgttggcaatattgatgaagatggcgtctgccgcgtgaagattgccgaagtggatggtaatgatccgctgttcaaagtgaaaaatggcgaaaacgccctggccttctatagccactattatcagccgctgccgttggtactgcgcggatatggtgcgggcaatgacgttacagctgccggtgtctttgctgatctgctacgtaccctctcatggaagttaggagtctga

SEQ ID NO: 250 - DNA, 1140 bp, Coryne-bacterium glutamicum
atgcccaccctcgcgccttcaggtcaacttgaaatccaagcgatcggtgatgtctccaccgaagccggagcaatcattacaaacgctgaaatcgcctatcaccgctggggtgaataccgcgtagataaagaaggacgcagcaatgtcgttctcatcgaacacgccctcactggagattccaacgcagccgattggtgggctgacttgctcggtcccggcaaagccatcaacactgatatttactgcgtgatctgtaccaacgtcatcggtggttgcaacggttccaccggacctggctccatgcatccagatggaaatttctggggtaatcgcttccccgccacgtccattcgtgatcaggtaaacgccgaaaaacaattcctcgacgcactcggcatcaccacggtcgccgcagtagtactacttggtggttccatgggtggtgcccgcaccctagagtgggccgcaatgtacccagaaactgttggcgcagctgctgttcttgcagtttctgcacgcgccagcgcctggcaaatcggcattcaatccgcccaaattaaggcgattgaaaacgaccaccactggcacgaaggcaactactacgaatccggctgcaacccagccaccggactcggcgccgcccgacgcatcgcccacctcacctaccgtggcgaactagaaatcgacgaacgcttcggcaccaaagcccaaaagaacgaaaacccactcggtccctaccgcaagcccgaccagcgcttcgccgtggaatcctacttggactaccaagcagacaagctagtacagcgtttcgacgccggctcctacgtcttgctcaccgacgccctcaaccgccacgacattggtcgcgaccgcggaggcctcaacaaggcactcgaatccatcaaagttccagtccttgtcgcaggcgtagataccgatattttgtacccctaccaccagcaagaacacctctccagaaacctgggaaatctactggcaatggcaaaaatcgtatcccctgtcggccacgatgctttcctcaccgaaagccgccaaatggatcgcatcgtgaggaacttcttcagcctcatctccccagacgaagacaacccttcgacctacatcgagttctacatctaa

SEQ ID NO: 251 - DNA, 927 bp, Escherichia coli
atgccgattcgtgtgccggacgagctacccgccgtcaatttcttgcgtgaagaaaacgtctttgtgatgacaacttctcgtgcgtctggtcaggaaattcgtccacttaaggttctgatccttaacctgatgccgaagaagattgaaactgaaaatcagtttctgcgcctgctttcaaactcacctttgcaggtcgatattcagctgttgcgcatcgattcccgtgaatcgcgcaacacgcccgcagagcatctgaacaacttctactgtaactttgaagatattcaggatcagaactttgacggtttgattgtaactggtgcgccgctgggcctggtggagtttaatgatgtcgcttactggccgcagatcaaacaggtgctggagtggtcgaaagatcacgtcacctcgacgctgtttgtctgctgggcggtacaggccgcgctcaatatcctctacggcattcctaagcaaactcgcaccgaaaaactctctggcgtttacgagcatcatattctccatcctcatgcgcttctgacgcgtggctttgatgattcattcctggcaccgcattcgcgctatgctgactttccggcagcgttgattcgtgattacaccgatctggaaattctggcagagacggaagaaggggatgcatatctgtttgccagtaaagataagcgcattgcctttgtgacgggccatcccgaatatgatgcgcaaacgctggcgcaggaatttttccgcgatgtggaagccggactagacccggatgtaccgtataactatttcccgcacaatgatccgcaaaatacaccgcgagcgagctggcgtagtcacggtaatttactgtttaccaactggctcaactattacgtctaccagatcacgccatacgatctacggcacatgaatccaacgctggat

SEQ ID NO: 252 - DNA, 1314 bp, Coryne-bacterium glutamicum
atgccaaagtacgacaattccaatgctgaccagtggggctttgaaacccgctccattcacgcaggccagtcagtagacgcacagaccagcgcacgaaaccttccgatctaccaatccaccgctttcgtgttcgactccgctgagcacgccaagcagcgtttcgcacttgaggatctaggccctgtttactcccgcctcaccaacccaaccgttgaggctttggaaaaccgcatcgcttccctcgaaggtggcgtccacgctgtagcgttctcctccggacaggccgcaaccaccaacgccattttgaacctggcaggagcgggcgaccacatcgtcacctccccacgcctctacggtggcaccgagactctattccttatcactcttaaccgcctgggtatcgatgtttccttcgtggaaaaccccgacgaccctgagtcctggcaggcagccgttcagccaaacaccaaagcattcttcggcgagactttcgccaacccacaggcagacgtcctggatattcctgcggtggctgaagttgcgcaccgcaacagcgttccactgatcatcgacaacaccatcgctaccgcagcgctcgtgcgcccgctcgagctcggcgcagacgttgtcgtcgcttccctcaccaagttctacaccggcaacggctccggactgggcggcgtgcttatcgacggcggaaagttcgattggactgtcgaaaaggatggaaagccagtattcccctacttcgtcactccagatgctgcttaccacggattgaagtacgcagaccttggtgcaccagccttcggcctcaaggttcgcgttggccttctacgcgacaccggctccaccctctccgcattcaacgcatgggctgcagtccagggcatcgacaccctttccctgcgcctggagcgccacaacgaaaacgccatcaaggttgcagaattcctcaacaaccacgagaaggtggaaaaggttaacttcgcaggcctgaaggattccccttggtacgcaaccaaggaaaagcttggcctgaagtacaccggctccgttctcaccttcgagatcaagggcggcaaggatgaggcttgggcatttatcgacgccctgaagctacactccaaccttgcaaacatcggcgatgttcgctccctcgttgttcacccagcaaccaccacccattcacagtccgacgaagctggcctggcacgcgcgggcgttacccagtccaccgtccgcctgtccgttggcatcgagaccattgatgatatcatcgctgacctcgaaggcggctttgctgcaatctag

SEQ ID NO: 253 - DNA, 1221 bp, Coryne-bacterium glutamicum
gtggctcagccaaccgccgtccgtttgttcaccagtgaatctgtaactgagggacatccagacaaaatatgtgatgctatttccgataccattttggacgcgctgctcgaaaaagatccgcagtcgcgcgtcgcagtggaaactgtggtcaccaccggaatcgtccatgttgttggcgaggtccgtaccagcgcttacgtagagatccctcaattagtccgcaacaagctcatcgaaatcggattcaactcctctgaggttggattcgacggacgcacctgtggcgtctcagtatccatcggtgagcagtcccaggaaatcgctgacggcgtggataactccgacgaagcccgcaccaacggcgacgttgaagaagacgaccgcgcaggtgctggcgaccagggcctgatgttcggctacgccaccaacgaaaccgaagagtacatgcctcttcctatcgcgttggcgcaccgactgtcacgtcgtctgacccaggttcgtaaagagggcatcgttcctcacctgcgtccagacggaaaaacccaggtcaccttcgcatacgatgcgcaagaccgccctagccacctggataccgttgtcatctccacccagcacgacccagaagttgaccgtgcatggttggaaacccaactgcgcgaacacgtcattgattgggtaatcaaagacgcaggcattgaggatctggcaaccggtgagatcaccgtgttgatcaacccttcaggttccttcattctgggtggccccatgggtgatgcgggtctgaccggccgcaagatcatcgtggatacctacggtggcatggctcgccatggtggtggagcattctccggtaaggatccaagcaaggtggaccgctctgctgcatacgccatgcgttgggtagcaaagaacatcgtggcagcaggccttgctgatcgcgctgaagttcaggttgcatacgccattggacgcgcaaagccagtcggactttacgttgaaacctttgacaccaacaaggaaggcctgagcgacgagcagattcaggctgccgtgttggaggtctttgacctgcgtccagcagcaattatccgtgagcttgatctgcttcgtccgatctacgctgacactgctgcctacggccactttggtcgcactgatttggaccttccttgggaggctatcgaccgcgttgatgaacttcgcgcagccctcaagttggcc

SEQ ID NO: 254 - DNA, 1152 bp, Escherichia coli
atggcaaaacacctttttacgtccgagtccgtctctgaagggcatcctgacaaaattgctgaccaaatttctgatgccgttttagacgcgatcctcgaacaggatccgaaagcacgcgttgcttgcgaaacctacgtaaaaaccggcatggttttagttggcggcgaaatcaccaccagcgcctgggtagacatcgaagagatcacccgtaacaccgttcgcgaaattggctatgtgcattccgacatgggctttgacgctaactcctgtgcggttctgagcgctatcggcaaacagtctcctgacatcaaccagggcgttgaccgtgccgatccgctggaacagggcgcgggtgaccagggtctgatgtttggctacgcaactaatgaaaccgacgtgctgatgccagcacctatcacctatgcacaccgtctggtacagcgtcaggctgaagtgcgtaaaaacggcactctgccgtggctgcgcccggacgcgaaaagccaggtgacttttcagtatgacgacggcaaaatcgttggtatcgatgctgtcgtgctttccactcagcactctgaagagatcgaccagaaatcgctgcaagaagcggtaatggaagagatcatcaagccaattctgcccgctgaatggctgacttctgccaccaaattcttcatcaacccgaccggtcgtttcgttatcggtggcccaatgggtgactgcggtctgactggtcgtaaaattatcgttgatacctacggcggcatggcgcgtcacggtggcggtgcattctctggtaaagatccatcaaaagtggaccgttccgcagcctacgcagcacgttatgtcgcgaaaaacatcgttgctgctggcctggccgatcgttgtgaaattcaggtttcctacgcaatcggcgtggctgaaccgacctccatcatggtagaaactttcggtactgagaaagtgccttctgaacaactgaccctgctggtacgtgagttcttcgacctgcgcccatacggtctgattcagatgctggatctgctgcacccgatctacaaagaaaccgcagcatacggtcactttggtcgtgaacatttcccgtgggaaaaaaccgacaaagcgcagctgctgcgcgatgctgccggtctgaag

SEQ ID NO: 255 - DNA, 1107 bp, Coryne-bacterium glutamicum
atgcgatttcctgaactcgaagaattgaagaatcgccggaccttgaaatggacccggtttccagaagacgtgcttcctttgtgggttgcggaaagtgattttggcacctgcccgcagttgaaggaagctatggcagatgccgttgagcgcgaggtcttcggatacccaccagatgctactgggttgaatgatgcgttgactggattctacgagcgtcgctatgggtttggcccaaatccggaaagtgttttcgccattccggatgtggttcgtggcctgaagcttgccattgagcatttcactaagcctggttcggcgatcattgtgccgttgcctgcataccctcctttcattgagttgcctaaggtgactggtcgtcaggcgatctacattgatgcgcatgagtacgatttgaaggaaattgagaaggccttcgctgacggtgcgggatcactgttgttctgcaatccacacaacccactgggcacggtcttttctgaagagtacatccgcgagctcaccgatattgcggcgaagtacgatgcccgcatcatcgtcgatgagatccacgcgccactggtttatgaaggcacccatgtggttgctgctggtgtttctgagaacgctgcaaacacttgcatcaccatcaccgcaacttctaaggcgtggaacactgctggtttgaagtgtgctcagatcttcttcagtaatgaagccgatgtgaaggcctggaagaatttgtcggatattacccgtgacggtgtgtccatccttggattgatcgctgcggagacagtgtacaacgagggcgaagaattccttgatgagtcaattcagattctcaaggacaaccgtgactttgcggctgctgaactggaaaagcttggcgtgaaggtctacgcaccggactccacttatttgatgtggttggacttcgctggcaccaagatcgaagaggcgccttctaaaattcttcgtgaggagggtaaggtcatgctgaatgatggcgcagcttttggtggtttcaccacctgcgctcgtcttaattttgcgtgttccagagagacccttgaggaggggctgcgccgtatcgccagcgtgttgtaa

SEQ ID NO: 256 - DNA, 1185 bp, Escherichia coli
atggcggacaaaaagcttgatactcaactggtgaatgcaggacgcagcaaaaaatacactctcggcgcggtaaatagcgtgattcagcgcgcttcttcgctggtctttgacagtgtagaagccaaaaaacacgcgacacgtaatcgcgccaatggagagttgttctatggacggcgcggaacgttaacccatttctccttacaacaagcgatgtgtgaactggaaggtggcgcaggctgcgtgctatttccctgcggggcggcagcggttgctaattccattcttgcttttatcgaacagggcgatcatgtgttgatgaccaacaccgcctatgaaccgagtcaggatttctgtagcaaaatcctcagcaaactgggcgtaacgacatcatggtttgatccgctgattggtgccgatatcgttaagcatctgcagccaaacactaaaatcgtgtttctggaatcgccaggctccatcaccatggaagtccacgacgttccggcgattgttgccgccgtacgcagtgtggtgccggatgccatcattatgatcgacaacacctgggcagccggtgtgctgtttaaggcgctggattttggcatcgatgtttctattcaagccgccaccaaatatctggttgggcattcagatgcgatgattggcactgccgtgtgcaatgcccgttgctgggagcagctacgggaaaatgcctatctgatgggccagatggtcgatgccgataccgcctatataaccagccgtggcctgcgcacattaggtgtgcgtttgcgtcaacatcatgaaagcagtctgaaagtggctgaatggctggcagaacatccgcaagttgcgcgagttaaccaccctgctctgcctggcagtaaaggtcacgaattctggaaacgagactttacaggcagcagcgggctattttcctttgtgcttaagaaaaaactcaataatgaagagctggcgaactatctggataacttcagtttattcagcatggcctactcgtggggcgggtatgaatcgttgatcctggcaaatcaaccagaacatatcgccgccattcgcccacaaggcgagatcgattttagcgggaccttgattcgcctgcatattggtctggaagatgtcgacgatctgattgccgatctggacgccggttttgcgcgaattgta

SEQ ID NO: 257 - DNA, 1344 bp, Coryne-bacterium glutamicum
atgacagttgatgagcaggtctctaactattacgacatgcttctgaagcgcaatgctggcgagcctgaatttcaccaggcagtggcagaggttttggaatctttgaagctcgtcctggaaaaggaccctcattacgctgattacggtctcatccagcgcctgtgcgagcctgagcgtcagctcatcttccgtgtgccttgggttgatgaccagggccaggtccacgtcaaccgtggtttccgcgtgcagttcaactctgcacttggaccatacaagggcggcctgcgcttccacccatctgtaaacctgggcattgtgaagttcctgggctttgagcagatctttaaaaactccctaaccggcctgccaatcggtggtggcaagggtggatccgacttcgaccctaagggcaagtccgatctggaaatcatgcgtttctgccagtccttcatgaccgagctacaccgccacatcggtgagtaccgcgacgttcctgcaggtgacatcggagttggtggccgcgagatcggttacctgtttggccactaccgtcgcatggctaaccagcacgagtccggcgttttgaccggtaagggcctgacctggggtggatccctggtccgcaccgaggcaactggctacggctgcgtttacttcgtgagtgaaatgatcaaggctaagggcgagagcatcagcggccagaagatcatcgtttccggttccggcaacgtagcaacctacgcgattgaaaaggctcaggaactcggcgcaaccgttattggtttctccgattccagcggttgggttcatacccctaacggcgttgacgtggctaagctccgcgaaatcaaggaagttcgtcgcgcacgcgtatccgtgtacgccgacgaagttgaaggcgcaacctaccacaccgacggttccatctgggatctcaagtgcgatatcgctcttccttgtgcaactcagaacgagctcaacggcgagaacgctaagactcttgcagacaacggctgccgtttcgttgctgaaggcgcgaacatgccttccacccctgaggctgttgaggtcttccgtgagcgcgacatccgcttcggaccaggcaaggccacccctgaggctgttgaggtcttccgtgagcgcgacatccgcttcggaccaggcaaggcagtcaacgtcggtggcgttgcaacctccgctctggagatgcagcagaacgcttcgcgcgagacctgtgcagagaccgcagcagagtatggacacgagaacgattacgttgtcggcgctaacattgctggcttcaagaaggtagctgacgcgatgctggcacagggcgtcatctaa

SEQ ID NO: 258 - DNA, 1341 bp, Escherichia coli
atggatcagacatattctctggagtcattcctcaaccatgtccaaaagcgcgacccgaatcaaaccgagttcgcgcaagccgttcgtgaagtaatgaccacactctggccttttcttgaacaaaatccaaaatatcgccagatgtcattactggagcgtctggttgaaccggagcgcgtgatccagtttcgcgtggtatgggttgatgatcgcaaccagatacaggtcaaccgtgcatggcgtgtgcagttcagctctgccatcggcccgtacaaaggcggtatgcgcttccatccgtcagttaacctttccattctcaaattcctcggctttgaacaaaccttcaaaaatgccctgactactctgccgatgggcggtggtaaaggcggcagcgatttcgatccgaaaggaaaaagcgaaggtgaagtgatgcgtttttgccaggcgctgatgactgaactgtatcgccacctgggcgcggataccgacgttccggcaggtgatatcggggttggtggtcgtgaagtcggctttatggcggggatgatgaaaaagctctccaacaataccgcctgcgtcttcaccggtaagggcctttcatttggcggcagtcttattcgcccggaagctaccggctacggtctggtttatttcacagaagcaatgctaaaacgccacggtatgggttttgaagggatgcgcgtttccgtttctggctccggcaacgtcgcccagtacgctatcgaaaaagcgatggaatttggtgctcgtgtgatcactgcgtcagactccagcggcactgtagttgatgaaagcggattcacgaaagagaaactggcacgtcttatcgaaatcaaagccagccgcgatggtcgagtggcagattacgccaaagaatttggtctggtctatctcgaaggccaacagccgtggtctctaccggttgatatcgccctgccttgcgccacccagaatgaactggatgttgacgccgcgcatcagcttatcgctaatggcgttaaagccgtcgccgaaggggcaaatatgccgaccaccatcgaagcgactgaactgttccagcaggcaggcgtactatttgcaccgggtaaagcggctaatgctggtggcgtcgctacatcgggcctggaaatggcacaaaacgctgcgcgcctgggctggaaagccgagaaagttgacgcacgtttgcatcacatcatgctggatatccaccatgcctgtgttgagcatggtggtgaaggtgagcaaaccaactacgtgcagggcgcgaacattgccggttttgtgaaggttgccgatgcgatgctggcgcagggtgtgatt

SEQ ID NO: 259 - DNA, 1629 bp, Coryne-bacterium glutamicum
atgaccatttcctcacctttgattgacgtcgccaaccttccagacatcaacaccactgccggcaagatcgccgaccttaaggctcgccgcgcggaagcccatttccccatgggtgaaaaggcagtagagaaggtccacgctgctggacgcctcactgcccgtgagcgcttggattacttactcgatgagggctccttcatcgagaccgatcagctggctcgccaccgcaccaccgctttcggcctgggcgctaagcgtcctgcaaccgacggcatcgtgaccggctggggcaccattgatggacgcgaagtctgcatcttctcgcaggacggcaccgtattcggtggcgcgcttggtgaggtgtacggcgaaaagatgatcaagatcatggagctggcaatcgacaccggccgcccattgatcggtctttacgaaggcgctggcgctcgtattcaggacggcgctgtctccctggacttcatttcccagaccttctaccaaaacattcaggcttctggcgttatcccacagatctccgtcatcatgggcgcatgtgcaggtggcaacgcttacggcccagctctgaccgacttcgtggtcatggtggacaagacctccaagatgttcgttaccggcccagacgtgatcaagaccgtcaccggcgaggaaatcacccaggaagagcttggcggagcaaccacccacatggtgaccgctggtaactcccactacaccgctgcgaccgatgaggaagcactggattgggtacaggacctggtgtccttcctcccatccaacaatcgctcctacgcaccgatggaagacttcgacgaggaagaaggcggcgttgaagaaaacatcaccgctgacgatctgaagctcgacgagatcatcccagattccgcgaccgttccttacgacgtccgcgatgtcatcgaatgcctcaccgacgatggcgaatacctggaaatccaggcagaccgcgcagaaaacgttgttattgcattcggccgcatcgaaggccagtccgttggctttgttgccaaccagccaacccagttcgctggctgcctggacatcgactcctctgagaaggcagctcgcttcgtccgcacctgcgacgcgttcaacatcccaatcgtcatgcttgtcgacgtccccggcttcctcccaggcgcaggccaggagtacggtggcattctgcgtcgtggcgcaaagctgctctacgcatacggcgaagcaaccgttccaaagatcaccgtcaccatgcgtaaggcttacggcggagcgtactgcgtgatgggttccaagggcttgggctctgacatcaaccttgcatggccaaccgcacagatcgccgtcatgggcgctgctggcgcagttggattcatctaccgcaaggagctcatggcagctgatgccaagggcctcgataccgtagctctggctaagtccttcgagcgcgagtatgaagaccacatgctcaacccgtaccacgctgcagaacgtggcctgatcgacgccgtgatcctgccaagcgaaacccgcggacagatttcccgcaaccttcgcctgctcaagcacaagaacgtcactcgccctgctcgcaagcacggcaacatgccactg

SEQ ID NO: 260 - DNA, 3666 bp, Coryne-bacterium glutamicum
atgtctacttcagttacttcaccagcccacaacaacgcacattcctccgaatttttggatgcgttggcaaaccatgtgttgatcggcgacggcgccatgggcacccagctccaaggctttgacctggacgtggaaaaggatttccttgatctggaggggtgtaatgagattctcaacgacacccgccctgatgtgttgaggcagattcaccgcgcctactttgaggcgggagctgacttggttgagaccaatacttttggttgcaacctgccgaacttggcggattatgacatcgctgatcgttgccgtgagcttgcctacaagggcactgcagtggctagggaagtggctgatgagatggggccgggccgaaacggcatgcggcgtttcgtggttggttccctgggacctggaacgaagcttccatcgctgggccatgcaccgtatgcagatttgcgtgggcactacaaggaagcagcgcttggcatcatcgacggtggtggcgatgcctttttgattgagactgctcaggacttgcttcaggtcaaggctgcggttcacggcgttcaagatgccatggctgaacttgatacattcttgcccattatttgccacgtcaccgtagagaccaccggcaccatgctcatgggttctgagatcggtgccgcgttgacagcgctgcagccactgggtatcgacatgattggtctgaactgcgccaccggcccagatgagatgagcgagcacctgcgttacctgtccaagcacgccgatattcctgtgtcggtgatgcctaacgcaggtcttcctgtcctgggtaaaaacggtgcagaatacccacttgaggctgaggatttggcgcaggcgctggctggattcgtctccgaatatggcctgtccatggtgggtggttgttgtggcaccacacctgagcacatccgtgcggtccgcgatgcggtggttggtgttccagagcaggaaacctccacactgaccaagatccctgcaggccctgttgagcaggcctcccgcgaggtggagaaagaggactccgtcgcgtcgctgtacacctcggtgccattgtcccaggaaaccggcatttccatgatcggtgagcgcaccaactccaacggttccaaggcattccgtgaggcaatgctgtctggcgattgggaaaagtgtgtggatattgccaagcagcaaacccgcgatggtgcacacatgctggatctttgtgtggattacgtgggacgagacggcaccgccgatatggcgaccttggcagcacttcttgctaccagctccactttgccaatcatgattgactccaccgagccagaggttattcgcacaggccttgagcacttgggtggacgaagcatcgttaactccgtcaactttgaagacggcgatggccctgagtcccgctaccagcgcatcatgaaactggtaaagcagcacggtgcggccgtggttgcgctgaccattgatgaggaaggccaggcacgtaccgctgagcacaaggtgcgcattgctaaacgactgattgacgatatcaccggcagctacggcctggatatcaaagacatcgttgtggactgcctgaccttcccgatctctactggccaggaagaaaccaggcgagatggcattgaaaccatcgaagccatccgcgagctgaagaagctctacccagaaatccacaccaccctgggtctgtccaatatttccttcggcctgaaccctgctgcacgccaggttcttaactctgtgttcctcaatgagtgcattgaggctggtctggactctgcgattgcgcacagctccaagattttgccgatgaaccgcattgatgatcgccagcgcgaagtggcgttggatatggtctatgatcgccgcaccgaggattacgatccgctgcaggaattcatgcagctgtttgagggcgtttctgctgccgatgccaaggatgctcgcgctgaacagctggccgctatgcctttgtttgagcgtttggcacagcgcatcatcgacggcgataagaatggccttgaggatgatctggaagcaggcatgaaggagaagtctcctattgcgatcatcaacgaggaccttctcaacggcatgaagaccgtgggtgagctgtttggttccggacagatgcagctgccattcgtgctgcaatcggcagaaaccatgaaaactgcggtggcctatttggaaccgttcatggaagaggaagcagaagctaccggatctgcgcaggcagagggcaagggcaaaatcgtcgtggccaccgtcaagggtgacgtgcacgatatcggcaagaacttggtggacatcattttgtccaacaacggttacgacgtggtgaacttgggcatcaagcagccactgtccgccatgttggaagcagcggaagaacacaaagcagacgtcatcggcatgtcgggacttcttgtgaagtccaccgtggtgatgaaggaaaaccttgaggagatgaacaacgccggcgcatccaattacccagtcattttgggtggcgctgcgctgacgcgtacctacgtggaaaacgatctcaacgaggtgtacaccggtgaggtgtactacgcccgtgatgctttcgagggcctgcgcctgatggatgaggtgatggcagaaaagcgtggtgaaggacttgatcccaactcaccagaagctattgagcaggcgaagaagaaggcggaacgtaaggctcgtaatgagcgttcccgcaagattgccgcggagcgtaaagctaatgcggctcccgtgattgttccggagcgttctgatgtctccaccgatactccaaccgcggcaccaccgttctggggaacccgcattgtcaagggtctgcccttggcggagttcttgggcaaccttgatgagcgcgccttgttcatggggcagtggggtctgaaatccacccgcggcaacgagggtccaagctatgaggatttggtggaaactgaaggccgaccacgcctgcgctactggctggatcgcctgaagtctgagggcattttggaccacgtggccttggtgtatggctacttcccagcggtcgcggaaggcgatgacgtggtgatcttggaatccccggatccacacgcagccgaacgcatgcgctttagcttcccacgccagcagcgcggcaggttcttgtgcatcgcggatttcattcgcccacgcgagcaagctgtcaaggacggccaagtggacgtcatgccattccagctggtcaccatgggtaatcctattgctgatttcgccaacgagttgttcgcagccaatgaataccgcgagtacttggaagttcacggcatcggcgtgcagctcaccgaagcattggccgagtactggcactcccgagtgcgcagcgaactcaagctgaacgacggtggatctgtcgctgattttgatccagaagacaagaccaagttcttcgacctggattaccgcggcgcccgcttctcctttggttacggttcttgccctgatctggaagaccgcgcaaagctggtggaattgctcgagccaggccgtatcggcgtggagttgtccgaggaactccagctgcacccagagcagtccacagacgcgtttgtgctctaccacccagaggcaaagtactttaacgtctaa

SEQ ID NO: 261 - DNA, 3684 bp, Escherichia coli
gtgagcagcaaagtggaacaactgcgtgcgcagttaaatgaacgtattctggtgctggacggcggtatgggcaccatgatccagagttatcgactgaacgaagccgattttcgtggtgaacgctttgccgactggccatgcgacctcaaaggcaacaacgacctgctggtactcagtaaaccggaagtgatcgccgctatccacaacgcctactttgaagcgggcgcggatatcatcgaaaccaacaccttcaactccacgaccattgcgatggcggattaccagatggaatccctgtcggcggaaatcaactttgcggcggcgaaactggcgcgagcttgtgctgacgagtggaccgcgcgcacgccagagaaaccgcgctacgttgccggtgttctcggcccgaccaaccgcacggcgtctatttctccggacgtcaacgatccggcatttcgtaatatcacttttgacgggctggtggcggcttatcgagagtccaccaaagcgctggtggaaggtggcgcggatctgatcctgattgaaaccgttttcgacacccttaacgccaaagcggcggtatttgcggtgaaaacggagtttgaagcgctgggcgttgagctgccgattatgatctccggcaccatcaccgacgcctccgggcgcacgctctccgggcagaccaccgaagcattttacaactcattgcgccacgccgaagctctgacctttggcctgaactgtgcgctggggcccgatgaactgcgccagtacgtgcaggagctgtcacggattgcggaatgctacgtcaccgcgcacccgaacgccgggctacccaacgcctttggtgagtacgatctcgacgccgacacgatggcaaaacagatacgtgaatgggcgcaagcgggttttctcaatatcgtcggcggctgctgtggcaccacgccacaacatattgcagcgatgagtcgtgcagtagaaggattagcgccgcgcaaactgccggaaattcccgtagcctgccgtttgtccggcctggagccgctgaacattggcgaagatagcctgtttgtgaacgtgggtgaacgcaccaacgtcaccggttccgctaagttcaagcgcctgatcaaagaagagaaatacagcgaggcgctggatgtcgcgcgtcaacaggtggaaaacggcgcgcagattatcgatatcaacatggatgaagggatgctcgatgccgaagcggcgatggtgcgttttctcaatctgattgccggtgaaccggatatcgctcgcgtgccgattatgatcgactcctcaaaatgggacgtcattgaaaaaggtctgaagtgtatccagggcaaaggcattgttaactctatctcgatgaaagagggcgtcgatgcctttatccatcacgcgaaattgttgcgtcgctacggtgcggcagtggtggtaatggcctttgacgaacagggacaggccgatactcgcgcacggaaaatcgagatttgccgtcgggcgtacaaaatcctcaccgaagaggttggcttcccgccagaagatatcatcttcgacccaaacatcttcgcggtcgcaactggcattgaagagcacaacaactacgcgcaggactttatcggcgcgtgtgaagacatcaaacgcgaactgccgcacgcgctgatttccggcggcgtatctaacgtttctttctcgttccgtggcaacgatccggtgcgcgaagccattcacgcagtgttcctctactacgctattcgcaatggcatggatatggggatcgtcaacgccgggcaactggcgatttacgacgacctacccgctgaactgcgcgacgcggtggaagatgtgattcttaatcgtcgcgacgatggcaccgagcgtttactggagcttgccgagaaatatcgcggcagcaaaaccgacgacaccgccaacgcccagcaggcggagtggcgctcgtgggaagtgaataaacgtctggaatactcgctggtcaaaggcattaccgagtttatcgagcaggataccgaagaagcccgccagcaggctacgcgcccgattgaagtgattgaaggcccgttgatggacggcatgaatgtggtcggcgacctgtttggcgaagggaaaatgttcctgccacaggtggtcaaatcggcgcgcgtcatgaaacaggcggtggcctacctcgaaccgtttattgaagccagcaaagagcagggcaaaaccaacggcaagatggtgatcgccaccgtgaagggcgacgtccacgacatcggtaaaaatatcgttggtgtggtgctgcaatgtaacaactacgaaattgtcgatctcggcgttatggtgcctgcggaaaaaattctccgtaccgctaaagaagtgaatgctgatctgattggcctttcggggcttatcacgccgtcgctggacgagatggttaacgtggcgaaagagatggagcgtcagggcttcactattccgttactgattggcggcgcgacgacctcaaaagcgcacacggcggtgaaaatcgagcagaactacagcggcccgacggtgtatgtgcagaatgcctcgcgtaccgttggtgtggtggcggcgctgctttccgatacccagcgtgatgattttgtcgctcgtacccgcaaggagtacgaaaccgtacgtattcagcacgggcgcaagaaaccgcgcacaccaccggtcacgctggaagcggcgcgcgataacgatttcgcttttgactggcaggcttacacgccgccggtggcgcaccgtctcggcgtgcaggaagtcgaagccagcatcgaaacgctgcgtaattacatcgactggacaccgttctttatgacctggtcgctggccgggaagtatccgcgcattctggaagatgaagtggtgggcgttgaggcgcagcggctgtttaaagacgccaacgacatgctggataaattaagcgccgagaaaacgctgaatccgcgtggcgtggtgggcctgttcccggcaaaccgtgtgggcgatgacattgaaatctaccgtgacgaaacgcgtacccatgtgatcaacgtcagccaccatctgcgtcaacagaccgaaaaaacaggcttcgctaactactgtctcgctgacttcgttgcgccgaagctttctggtaaagcagattacatcggcgcatttgccgtgactggcgggctggaagaggacgcactggctgatgcctttgaagcgcagcacgatgattacaacaaaatcatggtgaaagcgcttgccgaccgtttagccgaagcctttgcggagtatctccatgagcgtgtgcgtaaagtctactggggctatgcgccgaacgagaacctcagcaacgaagagctgatccgcgaaaactaccagggcatccgtccggcaccgggctatccggcctgcccggaacatacggaaaaagccaccatctgggagctgctggaagtggaaaaacacactggcatgaaactcacagaatctttcgccatgtggcccggtgcatcggtttcgggttggtacttcagccacccggacagcaagtactacgctgtagcacaaattcagcgcgatcaggttgaagattatgcccgccgtaaaggtatgagcgttaccgaagttgagcgctggctggcaccgaatctggggtatgacgcggactga

SEQ ID NO: 262 - DNA, 2238 bp, Coryne-bacterium glutamicum
atgacttccaacttttcttccactgtcgctggtcttcctcgcatcggagcgaagcgtgaactgaagttcgcgctcgaaggctactggaatggatcaattgaaggtcgcgaacttgcgcagaccgcccgccaattggtcaacactgcatcggattctttgtctggattggattccgttccgtttgcaggacgttcctactacgacgcaatgctcgataccgccgctattttgggtgtgctgccggagcgttttgatgacatcgctgatcatgaaaacgatggtctcccactgtggattgaccgctactttggcgctgctcgcggtactgagaccctgcctgcacaggcaatgaccaagtggtttgataccaactaccactacctcgtgccggagttgtctgcggatacacgtttcgttttggatgcgtccgcgctgattgaggatctccgttgccagcaggttcgtggcgttaatgcccgccctgttctggttggtccactgactttcctttcccttgctcgcaccactgatggttccaatcctttggatcacctgcctgcactgtttgaggtctacgagcgcctcatcaagtctttcgatactgagtgggttcagatcgatgagcctgcgttggtcaccgatgttgctcctgaggttttggagcaggtccgcgctggttacaccactttggctaagcgcgatggcgtgtttgtcaatacttacttcggctctggcgatcaggcgctgaacactcttgcgggcatcggccttggcgcgattggcgttgacttggtcacccatggcgtcactgagcttgctgcgtggaagggtgaggagctgctggttgcgggcatcgttgatggtcgtaacatttggcgcaccgacctgtgtgctgctcttgcttccctgaagcgcctggcagctcgcggcccaatcgcagtgtctacctcttgttcactgctgcacgttccttacaccctcgaggctgagaacattgagcctgaggtccgcgactggcttgccttcggctcggagaagatcaccgaggtcaagctgcttgccgacgccctagccggcaacatcgacgcggctgcgttcgatgcggcgtccgcagcaattgcttctcgacgcacctccccacgcaccgcaccaatcacgcaggaactccctggccgtagccgtggatccttcgacactcgtgttacgctgcaggagaagtcactggagcttccagctctgccaaccaccaccattggttctttcccacagaccccatccattcgttctgctcgcgctcgtctgcgcaaggaatccatcactttggagcagtacgaagaggcaatgcgcgaagaaatcgatctggtcatcgccaagcaggaagaacttggtcttgatgtgttggttcacggtgagccagagcgcaacgacatggttcagtacttctctgaacttctcgacggtttcctctcaaccgccaacggctgggtccaaagctacggctcccgctgtgttcgtcctccagtgttgttcggaaacgtttcccgcccagcgccaatgactgtcaagtggttccagtacgcacagagcctgacccagaagcatgtcaagggaatgctcaccggtccagtcaccatccttgcatggtccttcgttcgcgatgatcagccgctggctaccactgctgaccaggttgcactggcactgcgcgatgaaattaacgatctcatcgaggctggcgcgaagatcatccaggtggatgagcctgcgattcgtgaactgttgccgctacgagacgtcgataagcctgcctacctgcagtggtccgtggactccttccgcctggcgactgccggcgcacccgacgacgtccaaatccacacccacatgtgctactccgagttcaacgaagtgatctcctcggtcatcgcgttggatgccgatgtcaccaccatcgaagcagcacgttccgacatgcaggtcctcgctgctctgaaatcttccggcttcgagctcggcgtcggacctggtgtgtgggatatccactccccgcgcgttccttccgcgcaggaagtggacggtctcctcgaggctgcactgcagtccgtggatcctcgccagctgtgggtcaacccagactgtggtctgaagacccgtggatggccagaagtggaagcttccctaaaggttctcgttgagtccgctaagcaggctcgtgagaaaatcggagcaactatctaa

SEQ ID NO: 263 - DNA, 2259 bp, Escherichia coli
atgacaattcttaatcacaccctcggtttccctcgcgttggcctgcgtcgcgagctgaaaaaagcgcaagagagttattgggcggggaactccacgcgtgaagaactgctggcggtagggcgtgaattgcgtgctcgtcactgggatcaacaaaagcaagcgggtatcgacctgctgccggtgggcgattttgcctggtacgatcatgtactgaccaccagtctgctgctgggtaatgttccgccacgtcatcagaacaaagatggttcggtagatatcgacaccctgttccgtattggtcgtggacgtgcaccgactggcgaacctgcggcggcagcggaaatgaccaaatggtttaacaccaactatcactacatggtgccggagttcgttaaaggccaacagttcaaactgacctggacgcagctgctggaggaagtggacgaggcgctggcgctgggccacaaggtgaaacctgtgctgctggggccgattacctacctgtggctgggtaaagtgaaaggtgaacagtttgatcgcctgagcctgctgaacgacattctgccggtttatcagcaagtgctggcagaactggcgaaacgcggcatcgagtgggtacagattgatgaacccgcgttggtactggaactgccgcaggcgtggctggacgcatacaaacccgcttacgacgcgctccagggacaggtgaaactgctgctgaccacctattttgaaggcgtaacgccaaacctcgacacgattactgcgctgcctgttcagggtctgcatgtcgatctcgtacatggtaaagatgacgttgctgaactgcacaagcgtctgccttctgactggctgctgtctgcgggtcttatcaatggtcgtaacgtctggcgcgccgatcttaccgagaaatatgcgcaaattaaggacattgtcggcaaacgcgatttgtgggtggcatcttcctgctcgttgctgcacagccccatcgacttgagcgtggaaacgcgtcttgatgcagaagtgaaaagctggtttgccttcgccctgcaaaaatgtcatgaactggcattgctgcgcgatgcgttgaacagtggtgatacggcagctctggcagagtggagcgctccgattcaggcgcgtcgtcactctactcgtgtacataatccggcagtagaaaagcgtctggcggcgatcaccgcccaggacagtcagcgtgcgaatgtctatgaagtgcgtgctgaagctcagcgtgcgcgttttaaactgcccgcgtggccgaccaccacgattggttccttcccgcaaaccacggagattcgtaccctgcgtctggattttaaaaagggtaatctcgacgccaataactaccgcacgggcattgcggaacatatcaagcaggccattgttgagcaggaacgtttgggactggatgtgctggtacatggcgaggccgagcgtaatgacatggtggaatactttggcgagcatctggatggctttgtctttacgcaaaacggttgggtacagagctacggttcccgctgcgtgaagccaccgattgttattggtgacgttagccgcccggcaccgattaccgtggagtgggcaaaatatgcgcaatccctgactgataaaccggtgaaagggatgttgaccggcccggtgactattctctgctggtcgttcccgcgtgaagatgtcagccgtgaaaccatcgccaaacaaattgcgctggcgctgcgtgatgaagtcgcggacctggaagccgctggaattggcatcattcagattgacgaaccggcattgcgcgaaggtttaccactgcgtcgcagcgactgggatgcctatctccagtggggcgtggaggctttccgtatcaacgccgccgtggcgaaagatgacacacaaatccacactcacatgtgttactgcgagttcaacgacatcatggattcgattgcggcgctggacgcagacgtcatcaccatcgaaacctcgcgttccgacatggagttgctggagtcgtttgaagagtttgattatccaaatgaaatcggtcctggcgtctatgacattcactcgccaaacgtaccgagcgtggaatggattgaagccttgctgaagaaagcggcaaaacgcattccggcagagcgtctgtgggtcaacccggactgtggcctgaaaacgcgcggctggccagaaacccgcgcggcactggcgaacatggtgcaggcggcgcagaatttgcgtcgggga

SEQ ID NO: 264 - DNA, 1305 bp, Corynebacterium glutamicum
atgaccgatgcccaccaagcggacgatgtccgttaccagccactgaacgagcttgatcctgaggtggctgctgccatcgctggggaacttgcccgtcaacgcgatacattagagatgatcgcgtctgagaacttcgttccccgttctgttttgcaggcgcagggttctgttcttaccaataagtatgccgagggttaccctggccgccgttactacggtggttgcgaacaagttgacatcattgaggatcttgcacgtgatcgtgcgaaggctctcttcggtgcagagttcgccaatgttcagcctcactctggcgcacaggctaatgctgctgtgctgatgactttggctgagccaggcgacaagatcatgggtctgtctttggctcatggtggtcacttgacccacggaatgaagttgaacttctccggaaagctgtacgaggttgttgcgtacggtgttgatcctgagaccatgcgtgttgatatggatcaggttcgtgagattgctctgaaggagcagccaaaggtaattatcgctggctggtctgcataccctcgccaccttgatttcgaggctttccagtctattgctgcggaagttggcgcgaagctgtgggtcgatatggctcacttcgctggtcttgttgctgctggtttgcacccaagcccagttccttactctgatgttgtttcttccactgtccacaagactttgggtggacctcgttccggcatcattctggctaagcaggagtacgcgaagaagctgaactcttccgtattcccaggtcagcagggtggtcctttgatgcacgcagttgctgcgaaggctacttctttgaagattgctggcactgagcagttccgtgaccgtcaggctcgcacgttggagggtgctcgcattcttgctgagcgtctgactgcttctgatgcgaaggccgctggcgtggatgtcttgaccggtggcactgatgtgcacttggttttggctgatctgcgtaactcccagatggatggccagcaggcggaagatctgctgcacgaggttggtatcactgtgaaccgtaacgcggttcctttcgatcctcgtccaccaatggttacttctggtctgcgtattggtactcctgcgctggctacccgtggtttcgatattcctgcattcactgaggttgcagacatcattggtactgctttggctaatggtaagtccgcagacattgagtctctgcgtggccgtgtagcaaagcttgctgcagattacccactgtatgagggcttggaagactggaccatcgtctaa

SEQ ID NO: 265 - DNA, 1254 bp, Escherichia coli
atgttaaagcgtgaaatgaacattgccgattatgatgccgaactgtggcaggctatggagcaggaaaaagtacgtcaggaagagcacatcgaactgatcgcctccgaaaactacaccagcccgcgcgtaatgcaggcgcagggttctcagctgaccaacaaatatgctgaaggttatccgggcaaacgctactacggcggttgcgagtatgttgatatcgttgaacaactggcgatcgatcgtgcgaaagaactgttcggcgctgactacgctaacgtccagccgcactccggctcccaggctaactttgcggtctacaccgcgctgctggaaccaggtgataccgttctgggtatgaacctggcgcatggcggtcacctgactcacggttctccggttaacttctccggtaaactgtacaacatcgttccttacggtatcgatgctaccggtcatatcgactacgccgatctggaaaaacaagccaaagaacacaagccgaaaatgattatcggtggtttctctgcatattccggcgtggtggactgggcgaaaatgcgtgaaatcgctgacagcatcggtgcttacctgttcgttgatatggcgcacgttgcgggcctggttgctgctggcgtctacccgaacccggttcctcatgctcacgttgttactaccaccactcacaaaaccctggcgggtccgcgcggcggcctgatcctggcgaaaggtggtagcgaagagctgtacaaaaaactgaactctgccgttttccctggtggtcagggcggtccgttgatgcacgtaatcgccggtaaagcggttgctctgaaagaagcgatggagcctgagttcaaaacttaccagcagcaggtcgctaaaaacgctaaagcgatggtagaagtgttcctcgagcgcggctacaaagtggtttccggcggcactgataaccacctgttcctggttgatctggttgataaaaacctgaccggtaaagaagcagacgccgctctgggccgtgctaacatcaccgtcaacaaaaacagcgtaccgaacgatccgaagagcccgtttgtgacctccggtattcgtgtaggtactccggcgattacccgtcgcggctttaaagaagccgaagcgaaagaactggctggctggatgtgtgacgtgctggacagcatcaatgatgaagccgttatcgagcgcatcaaaggtaaagttctcgacatctgcgcacgttacccggtttacgcataa

SEQ ID NO: 266 - DNA, 1050 bp, Coryne-bacterium glutamicum
ttggtggaggtgaataaatgccagaggcagtcccaacaaaacactctcatcacactaagatacccaggcatgtccctaacgaacatcccagcctcatctcaatgggcaattagcgacgttttgaagcgtccttcacccggccgagtacctttttctgtcgagtttatgccaccccgcgacgatgcagctgaagagcgtctttaccgcgcagcagaggtcttccatgacctcggtgcatcgtttgtctccgtgacttatggtgctggcggatcaacccgtgagagaacctcacgtattgctcgacgattagcgaaacaaccgttgaccactctggtgcacctgaccctggttaaccacactcgcgaagagatgaaggcaattcttcgggaatacctagagctgggattaacaaacctgttggcgcttcgaggagatccgcctggagacccattaggcgattgggtgagcaccgatggaggactgaactatgcctctgagctcatcgatcttattaagtccactcctgagttccgggaattcgacctcggtatcgcctccttccccgaagggcatttccgggcgaaaactctagaagaagacaccaaatacactctggcgaagctgcgtggaggggcagagtactccatcacgcagatgttctttgatgtggaagactacctgcgacttcgtgatcgccttgtcgctgcagaccccattcatggtgcgaagccaatcattcctggcatcatgcccattaccgagctgcggtctgtgcgtcgacaggtcgaactctctggtgctcaattgccgagccaactagaagaatcacttgttcgagctgcaaacggcaatgaagaagcgaacaaagacgagatccgcaaggtgggcattgaatattccaccaatatggcagagcgactcattgccgaaggtgcggaagatctgcacttcatgacgcttaacttcacccgtgcaacccaagaagtgttgtacaaccttggcatggcgcctgcttggggagcagagcacggccaagacgcggtgcgttaa

SEQ ID NO: 267 - DNA, 888 bp, Escherichia coli
atgagcttttttcacgccagccagcgggatgccctgaatcagagcctggcagaagtccaggggcagattaacgtttcgttcgagtttttcccgccgcgtaccagtgaaatggagcagaccctgtggaactccatcgatcgccttagcagcctgaaaccgaagtttgtatcggtgacctatggcgcgaactccggcgagcgcgaccgtacgcacagcattattaaaggcattaaagatcgcactggtctggaagcggcaccgcatcttacttgcattgatgcgacgcccgacgagctgcgcaccattgcacgcgactactggaataacggtattcgtcatatcgtggcgctgcgtggcgatctgccgccgggaagtggtaagccagaaatgtatgcttctgacctggtgacgctgttaaaagaagtggcagatttcgatatctccgtggcggcgtatccggaagttcacccggaagcaaaaagcgctcaggcggatttgcttaatctgaaacgcaaagtggatgccggagccaaccgcgcgattactcagttcttcttcgatgtcgaaagctacctgcgttttcgtgaccgctgtgtatcggcgggcattgatgtggaaattattccgggaattttgccggtatctaactttaaacaggcgaagaaatttgccgatatgaccaacgtgcgtattccggcgtggatggcgcaaatgttcgacggtctggatgatgatgccgaaacccgcaaactggttggcgcgaatattgccatggatatggtgaagattttaagccgtgaaggagtgaaagatttccacttctatacgcttaaccgtgctgaaatgagttacgcgatttgccatacgctgggggttcgacctggttta

SEQ ID NO: 268 - DNA, 567 bp, Corynebacterium glutamicum
atgctctcgacaataaaaatgatccgtgaagatctcgcaaacgctcgtgaacacgatccagcagcccgaggcgatttagaaaacgcagtggtttactccggactccacgccatctgggcacatcgagttgccaacagctggtggaaatccggtttccgcggccccgcccgcgtattagcccaattcacccgattcctcaccggcattgaaattcaccccggtgccaccattggtcgtcgcttttttattgaccacggaatgggaatcgtcatcggcgaaaccgctgaaatcggcgaaggcgtcatgctctaccacggcgtcaccctcggcggacaggttctcacccaaaccaagcgccaccccacgctctgcgacaacgtgacagtcggcgcgggcgcaaaaatcttaggtcccatcaccatcggcgaaggctccgcaattggcgccaatgcagttgtcaccaaagacgtgccggcagaacacatcgcagtcggaattcctgcggtagcacgcccacgtggcaagacagagaagatcaagctcgtcgatccggactattacatttaa

SEQ ID NO: 269 - DNA, 819 bp, Escherichia coli
atgtcgtgtgaagaactggaaattgtctggaacaatattaaagccgaagccagaacgctggcggactgtgagccaatgctggccagtttttaccacgcgacgctactcaagcacgaaaaccttggcagtgcactgagctacatgctggcgaacaagctgtcatcgccaattatgcctgctattgctatccgtgaagtggtggaagaagcctacgccgctgacccggaaatgatcgcctctgcggcctgtgatattcaggcggtgcgtacccgcgacccggcagtcgataaatactcaaccccgttgttatacctgaagggttttcatgccttgcaggcctatcgcatcggtcactggttgtggaatcaggggcgtcgcgcactggcaatctttctgcaaaaccaggtttctgtgacgttccaggtcgatattcacccggcagcaaaaattggtcgcggtatcatgcttgaccacgcgacaggcatcgtcgttggtgaaacggcggtgattgaaaacgacgtatcgattctgcaatctgtgacgcttggcggtacgggtaaatctggtggtgaccgtcacccgaaaattcgtgaaggtgtgatgattggcgcgggcgcgaaaatcctcggcaatattgaagttgggcgcggcgcgaagattggcgcaggttccgtggtgctgcaaccggtgccgccgcataccaccgccgctggcgttccggctcgtattgtcggtaaaccagacagcgataagccatcaatggatatggaccagcatttcaacggtattaaccatacatttgagtatggggatgggatc

SEQ ID NO: 270 - DNA, 1437 bp, Coryne-bacterium glutamicum
gtgcgttctgctaccactgtcgatgctgaagtcatcgccgctgcccctaacttgaagatcgtcggtcgtgccggcgtgggcttggacaacgttgacatccctgctgccactgaagctggcgtcatggttgctaacgcaccgacctctaatattcactccgcttgtgagcacgcaatttctttgctgctgtctactgctcgccagatccctgctgctgatgcgacgctgcgtgagggcgagtggaagcggtcttctttcaacggtgtggaaattttcggaaaaactgtcggtatcgtcggttttggccacattggtcagttgtttgctcagcgtcttgctgcgtttgagaccaccattgttgcttacgatccttacgctaaccctgctcgtgcggctcagctgaacgttgagttggttgagttggatgagctgatgagccgttctgactttgtcaccattcaccttcctaagaccaaggaaactgctggcatgtttgatgcgcagctccttgctaagtccaagaagggccagatcatcatcaacgctgctcgtggtggccttgttgatgagcaggctttggctgatgcgattgagtccggtcacattcgtggcgctggtttcgatgtgtactccaccgagccttgcactgattctcctttgttcaagttgcctcaggttgttgtgactcctcacttgggtgcttctactgaagaggctcaggatcgtgcgggtactgacgttgctgattctgtgctcaaggcgctggctggcgagttcgtggcggatgctgtgaacgtttccggtggtcgcgtgggcgaagaggttgctgtgtggatggatctggctcgcaagcttggtcttcttgctggcaagcttgtcgacgccgccccagtctccattgaggttgaggctcgaggcgagctttcttccgagcaggtcgatgcacttggtttgtccgctgttcgtggtttgttctccggaattatcgaagagtccgttactttcgtcaacgctcctcgcattgctgaagagcgtggcctggacatctccgtgaagaccaactctgagtctgttactcaccgttccgtcctgcaggtcaaggtcattactggcagcggcgcgagcgcaactgttgttggtgccctgactggtcttgagcgcgttgagaagatcacccgcatcaatggccgtggcctggatctgcgcgcagagggtctgaacctcttcctgcagtacactgacgctcctggtgcactgggtaccgttggtaccaagctgggtgctgctggcatcaacatcgaggctgctgcgttgactcaggctgagaagggtgacggcgctgtcctgatcctgcgtgttgagtccgctgtctctgaagagctggaagctgaaatcaacgctgagttgggtgctacttccttccaggttgatcttgac

SEQ ID NO: 271 - DNA, 1230 bp, Escherichia coli
atggcaaaggtatcgctggagaaagacaagattaagtttctgctggtagaaggcgtgcaccaaaaggcgctggaaagccttcgtgcagctggttacaccaacatcgaatttcacaaaggcgcgctggatgatgaacaattaaaagaatccatccgcgatgcccacttcatcggcctgcgatcccgtacccatctgactgaagacgtgatcaacgccgcagaaaaactggtcgctattggctgtttctgtatcggaacaaaccaggttgatctggatgcggcggcaaagcgcgggatcccggtatttaacgcaccgttctcaaatacgcgctctgttgcggagctggtgattggcgaactgctgctgctattgcgcggcgtgccggaagccaatgctaaagcgcaccgtggcgtgtggaacaaactggcggcgggttcttttgaagcgcgcggcaaaaagctgggtatcatcggctacggtcatattggtacgcaattgggcattctggctgaatcgctgggaatgtatgtttacttttatgatattgaaaataaactgccgctgggcaacgccactcaggtacagcatctttctgacctgctgaatatgagcgatgtggtgagtctgcatgtaccagagaatccgtccaccaaaaatatgatgggcgcgaaagaaatttcactaatgaagcccggctcgctgctgattaatgcttcgcgcggtactgtggtggatattccggcgctgtgtgatgcgctggcgagcaaacatctggcgggggcggcaatcgacgtattcccgacggaaccggcgaccaatagcgatccatttacctctccgctgtgtgaattcgacaacgtccttctgacgccacacattggcggttcgactcaggaagcgcaggagaatatcggcctggaagttgcgggtaaattgatcaagtattctgacaatggctcaacgctctctgcggtgaacttcccggaagtctcgctgccactgcacggtgggcgtcgtctgatgcacatccacgaaaaccgtccgggcgtgctaactgcgctgaacaaaatcttcgccgagcagggcgtcaacatcgccgcgcaatatctgcaaacttccgcccagatgggttatgtggttattgatattgaagccgacgaagacgttgccgaaaaagcgctgcaggcaatgaaagctattccgggtaccattcgcgcccgtctgctgtac

SEQ ID NO: 272 - DNA, 702 bp, Coryne-bacterium glutamicum
atggaaatcttcattacaggtctgcttttgggggccagtcttttactgtccatcggaccgcagaatgtactggtgattaaacaaggaattaagcgcgaaggactcattgcggttcttctcgtgtgtttaatttctgacgtctttttgttcatcgccggcaccttgggcgttgatcttttgtccaatgccgcgccgatcgtgctcgatattatgcgctggggtggcatcgcttacctgttatggtttgccgtcatggcagcgaaagacgccatgacaaacaaggtggaagcgccacagatcattgaagaaacagaaccaaccgtgcccgatgacacgcctttgggcggttcggcggtggccactgacacgcgcaaccgggtgcgggtggaggtgagcgtcgataagcagcgggtttgggtaaagcccatgttgatggcaatcgtgctgacctggttgaacccgaatgcgtatttggacgcgtttgtgtttatcggcggcgtcggcgcgcaatacggcgacaccggacggtggattttcgccgctggcgcgttcgcggcaagcctgatctggttcccgctggtgggtttcggcgcagcagcattgtcacgcccgctgtccagccccaaggtgtggcgctggatcaacgtcgtcgtggcagttgtgatgaccgcattggccatcaaactgatgttgatgggttag

SEQ ID NO: 273 - DNA, 1161 bp, Coryne-bacterium glutamicum
ttgtcttttgacccaaacacccagggtttctccactgcatcgattcacgctgggtatgagccagacgactactacggttcgattaacaccccaatctatgcctccaccaccttcgcgcagaacgctccaaacgaactgcgcaaaggctacgagtacacccgtgtgggcaaccccaccatcgtggcattagagcagaccgtcgcagcactcgaaggcgcaaagtatggccgcgcattctcctccggcatggctgcaaccgacatcctgttccgcatcatcctcaagccgggcgatcacatcgtcctcggcaacgatgcttacggcggaacctaccgcctgatcgacaccgtattcaccgcatggggcgtcgaatacaccgttgttgatacctccgtcgtggaagaggtcaaggcagcgatcaaggacaacaccaagctgatctgggtggaaaccccaaccaacccagcacttggcatcaccgacatcgaagcagtagcaaagctcaccgaaggcaccaacgccaagctggttgttgacaacaccttcgcatccccatacctgcagcagccactaaaactcggcgcacacgcagtcctgcactccaccaccaagtacatcggaggacactccgacgttgttggcggccttgtggttaccaacgaccaggaaatggacgaagaactgctgttcatgcagggcggcatcggaccgatcccatcagttttcgatgcatacctgaccgcccgtggcctcaagacccttgcagtgcgcatggatcgccactgcgacaacgcagaaaagatcgcggaattcctggactcccgcccagaggtctccaccgtgctctacccaggtctgaagaaccacccaggccacgaagtcgcagcgaagcagatgaagcgcttcggcggcatgatctccgtccgtttcgcaggcggcgaagaagcagctaagaagttctgtacctccaccaaactgatctgtctggccgagtccctcggtggcgtggaatccctcctggagcacccagcaaccatgacccaccagtcagctgccggctctcagctcgaggttccccgcgacctcgtgcgcatctccattggtattgaagacattgaagacctgctcgcagatgtcgagcaggccctcaataacctttag

SEQ ID NO: 274 - DNA, 1158 bp, Escherichia coli
atgacgcgtaaacaggccaccatcgcagtgcgtagcgggttaaatgacgacgaacagtatggttgcgttgtcccaccgatccatctttccagcacctataactttaccggatttaatgaaccgcgcgcgcatgattactcgcgtcgcggcaacccaacgcgcgatgtggttcagcgtgcgctggcagaactggaaggtggtgctggtgcagtacttactaataccggcatgtccgcgattcacctggtaacgaccgtctttttgaaacctggcgatctgctggttgcgccgcacgactgctacggcggtagctatcgcctgttcgacagtctggcgaaacgcggttgctatcgcgtgttgtttgttgatcaaggcgatgaacaggcattacgggcagcgctggcagaaaaacccaaactggtactggtagaaagcccaagtaatccattgttacgcgtcgtggatattgcgaaaatctgccatctggcaagggaagtcggggcggtgagcgtggtggataacaccttcttaagcccggcattacaaaatccgctggcattaggtgccgatctggtgttgcattcatgcacgaaatatctgaacggtcactcagacgtagtggccggcgtggtgattgctaaagacccggacgttgtcactgaactggcctggtgggcaaacaatattggcgtgacgggcggcgcgtttgacagctatctgctgctacgtgggttgcgaacgctggtgccgcgtatggagctggcgcagcgcaacgcgcaggcgattgtgaaatacctgcaaacccagccgttggtgaaaaaactgtatcacccgtcgttgccggaaaatcaggggcatgaaattgccgcgcgccagcaaaaaggctttggcgcaatgttgagttttgaactggatggcgatgagcagacgctgcgtcgtttcctgggcgggctgtcgttgtttacgctggcggaatcattagggggagtggaaagtttaatctctcacgccgcaaccatgacacatgcaggcatggcaccagaagcgcgtgctgccgccgggatctccgagacgctgctgcgtatctccaccggtattgaagatggcgaagatttaattgccgacctggaaaatggcttccgggctgcaaacaagggg

SEQ ID NO: 275 - DNA, 621 bp, Corynebacterium glutamicum
gtggacgcagcatcatgggtcgcattcgcactcgcattattggtggcattagcggtgcccggacctgaccttgttcttgttctacattctgcaacccgcgggatccgcacgggggtcatgactgcggcaggaatcatgacgggactgatgttacatgcgagtcttgcgatagccggagcaactgcattattgctatcagctccgggagtattgagcgctattcaacttcttggtgcgggagtgcttttgtggatgggcacgaacatgtttcgtgcttcccaaaataccggggaatctgaaactgctgctagtcaatcgagtgcaggttattttcgaggatttatcaccaatgccacgaacccgaaagcgctgttgttctttgcagcgattcttcctcagttcattgggaatggggaagatatgaaaatgaggaccttggcattgtgtgccaccatcgtgcttggctcaggagcgtggtggttgggaacaatcgcattggtcaggggtattggtctgcaaaagttaccgtctgcggatcgcattatcaccctggttggtggcatcgcactgtttctcattggtgccggattactggttaatactgcttatgggcttatcact

SEQ ID NO: 276 - DNA, 1467 bp, Coryne-bacterium glutamicum
atgttgagttttgcgacccttcgtggccgcatttcaacagttgacgctgcaaaagccgcacctccgccatcgccactagccccgattgatctcactgaccatagtcaagtggccggtgtgatgaatttggctgcgagaattggcgatattttgctttcttcaggtacgtcaaatagtgacaccaaggtacaagttcgagcagtgacctctgcgtacggtttgtactacacgcacgtggatatcacgttgaatacgatcaccatcttcaccaacatcggtgtggagaggaagatgccggtcaacgtgtttcatgttgtaggcaagttggacaccaacttctccaaactgtctgaggttgaccgtttgatccgttccattcaggctggtgcgaccccgcctgaggttgccgagaaaatcctggacgagttggagcaatcccctgcgtcttatggtttccctgttgcgttgcttggctgggcaatgatgggtggtgctgttgctgtgctgttgggtggtggatggcaggtttccctaattgcttttattaccgcgttcacgatcattgccacgacgtcatttttgggaaagaagggtttgcctactttcttccaaaatgttgttggtggttttattgccacgctgcctgcatcgattgcttattctttggcgttgcaatttggtcttgagatcaaaccgagccagatcatcgcatctggaattgttgtgctgttggcaggtttgacactcgtgcaatctctgcaggacggcatcacgggcgctccggtgacagcaagtgcacgatttttcgaaacactcctgtttaccggcggcattgttgctggcgtgggtttgggcattcagctttctgaaatcttgcatgtcatgttgcctgccatggagtccgctgcagcacctaattattcgtctacattcgcccgcattatcgctggtggcgtcaccgcagcggccttcgcagtgggttgttacgcggagtggtcctcggtgattattgcggggcttactgcgctgatgggttctgcgttttattacctcttcgttgtttatttaggccccgtctctgccgctgcgattgctgcaacagcagttggtttcactggtggtttgcttgcccgtcgattcttgattccaccgttgattgtggcgattgccggcatcacaccaatgcttccaggtctagcaatttaccgcggaatgtacgccaccctgaatgatcaaacactcatgggtttcaccaacattgcggttgctttagccactgcttcatcacttgccgctggcgtggttttgggtgagtggattgcccgcaggctacgtcgtccaccacgcttcaacccataccgtgcatttaccaaggcgaatgagttctccttccaggaggaagctgagcagaatcagcgccggcagagaaaacgtccaaagactaatcagagattcggtaataaaagg

SEQ ID NO: 277 - DNA, 903 bp, Coryne-bacterium glutamicum
atgaataaacagtccgctgcagtgttgatggtgatgggttccgccctatccctgcaatttggtgctgccattggaacgcagcttttccccctcaacggcccctgggctgtcacctctttaaggctgttcatcgcaggcttgatcatgtgcctggtgatccgcccgcgacttcgttcctggactaaaaaacaatggatcgccgtgctgctgttgggattatctcttggcggaatgaacagcctgttttacgcatccatcgaactcatcccgctgggtaccgccgtgaccattgagttcctcggccccctgattttctccgcggtgttagcccgcacgctgaaaaacggattgtgcgtggctttagcgtttctcggcatggcactactgggtatcgattccctcagcggcgaaacccttgacccactcggcgtcattttcgcagccgtcgcaggaatcttctgggtgtgctacatcctggcatcaaagaaaatcggccaactcatccccggaacaagcggcctggccgtcgcactgattatcggcgcagtggcagtatttccactgggtgctacacacatgggcccgattttccagaccccaaccctactcatcctggcgcttggcacagcacttctcgggtcgcttatcccctattcgctggaattatcggcactgcgccgactccccgcccccattttcagtattctgctcagcctcgaaccggcattcgccgccgccgtcggctggatcctgcttgatcaaacccccaccgcgctcaagtgggccgcgatcatccttgtcatcgcggccagcatcggcgtcacgtgggagcctaaaaagatgcttgtcgacgcgcccctccactcaaaatgcaacgcgaagaggcgagtacacacacctagt

SEQ ID NO: 278 - DNA, 858 bp, Coryne-bacterium glutamicum
gtgaatgatgctggcttgaagacgcgaaacccggtgcttgcccccattttgatggtggttaacggcgtgtccctttatgccggagcagcgttggcggtggggctgtttgagagtttcccacccgcgttggttgcgtggatgcgagtagcagcggctgcggtgattttgcttgtgctgtatcggcctgcagtgcgaaattttattgggcagaccgggttttatgcggcggtgtatggcgtttccacgcttgccatgaacatcacgttctatgaggcgatcgcccgcattccgatgggtaccgcggtggccattgagttcttgggacctattgcagtggccgcgttgggcagtaagacgctgcgggattgggctgcgttggttttagctggcatcggagtgataattattagcggtgcgcagtggtcggccaacagcgtgggcgtcatgtttgcactggcagcagcattactgtgggctgcgtacatcatcgcgggaaaccgcattgcaggcgatgcctcctcaagtagaaccggcatggcggtgggattcacgtgggcatcagtgttgtctttgccgttggcgatctggtggtggccgggtctgggagcaacggaacttacgttaatcgaggtcatcggattagcacttggtttgggcgtgctgtcggcggtgattccttatggccttgaccagattgtgctccgcatggccgggcgatcctactttgcgctgctcctggctattttgccgatcagcgccgcgctcatgggagcgcttgcgctgggccaaatgttgtcggtggctgagcttgtcggcattgtgctggttgtcatcgcagttgctttgcgacgcccctcc

SEQ ID NO: 279 - DNA, 1539 bp, Coryne-bacterium glutamicum
atggttctggtaatcgccggaataatccacccgctcctgccggaataccgttgggttctcattcaccttttcacccttggtgccatcaccaattcgattgtggtgtggtcgcagcatttcacggaaaagtttctgcatttaaagcttgaggaatcgaaacgccctgcgcagctactgaaaattcgggtgctgaatgtgggaattatcgtcacgattattgggcagatgatcggtcagtggatcgtcaccagtgtcggcgcgacgattgtgggcggtgctttggcgtggcacgcaggcagtttggcatcacagttccggagcgcaaaacgcggtcagcctttcgcgtcggcagtgatcgcgtatgttgccagcgcgtgctgcctgccgtttggcgcatttgccggagcgttgttgtccaaggagctgtcgggacatctccaggaacgagtccttctcacccacacggtgattaattttctaggtttcgtgggatttgctgcgctcggttcgctgtcggtgctgttcgccgcgatttggcgcaccaaaattcgccacaatttcaccccgtggtctgtggggatcatggcggtgagcctgccgatcatcgtcacgggcatcctgctcaacaacggctatgtcgccgccacaggcctggccgcgtacgtggcagcatggttgctggccatggtggggtgggggaaggcgtcgataagcaatttaagcttttcgacgtccacctccaccaccgcacccctttggctcgtgggcacgcttgtgtggctggcggtgcaggcggtgatgcatgacggcgagctttaccatgtggaagttcccacgattgcgctggtcatcggctttggcgcgcagcttctgatcggtgtgatgagttatctactgccgtcgacgatgggtggcggcgcgagcgcggtgcggactggaacgcacattttaaacactgcggggctgtttaggtggacgctgatcaacggtggcctggcgatttggctgctcaccgacaattcgtggctgcgcgtcgtggtgtctctgctgagtatcggagcgttggcagtttttgtcattctgctgcccaaggctgtgcgggcgcagcgcggagtgatcaccaaaaagcgcgaaccaattactccgccggaggagcctcgactcaatcaaattaccgcgggaatctctgtgcttgccctgattttggcagcattcggtgggctcaaccccggtgttgcgccggtggcaagctcaaatgaagacgtctatgctgtgaccattaccgcaggtgacatggtgtttatccctgatgtgattgaagtgcctgctggtaaatcactcgaagtcacgatgctcaacgaagacgacatggtgcacgatctgaaatttgccaacggtgtgcaaaccggacgtgtggcgccaggtgatgaaattacggtgaccgtcggcgatatttccgaagacatggacggctggtgcaccatcgctgggcaccgcgcgcaaggaatggatctggaagtaaaggttgcggctccgaat

SEQ ID NO: 280 - DNA, 633 bp, Escherichia coli
gtgttttcttattactttcaaggtcttgcacttggggcggctatgatcctaccgctcggtccacaaaatgcttttgtgatgaatcagggcatacgtcgtcagtaccacattatgattgccttactttgtgctatcagcgatttggtcctgatttgcgccgggatttttggtggcagcgcgttattgatgcagtcgccgtggttgctggcgctggtcacctggggcggcgtagccttcttgctgtggtatggttttggcgcttttaaaacagcaatgagcagtaatattgagttagccagcgccgaagtcatgaagcaaggcagatggaaaattatcgccaccatgttggcagtgacctggctgaatccgcatgtttacctggatacttttgttgtactgggcagccttggcgggcaacttgatgtggaaccaaaacgctggtttgcactcgggacaattagcgcctctttcctgtggttctttggtctggctcttctcgcagcctggctggcaccgcgtctgcgcacggcaaaagcacagcgcattatcaatctggttgtgggatgtgttatgtggtttattgccttgcagctggcgagagacggtattgctcatgcacaagccttgttcagt

SEQ ID NO: 281 - protein, 379 aa, Thermobifida fusca
MSHDTTPPLPATGAWREGDPPGDRRWVELSEPLPLETGGELPGVRLAYETWGSLNEDRSNAVLVLHALTGDSHVVGPEGPGHPSPGWWEGIIGPGLALDTDRYFVVAPNVLGGCQGSTGPSSTAPDGRPWGSRFPRITIRDTVRAEFALLREFGIHSWAAVLGGSMGGMRALEWAATYPERVRRLLLLASPAASSAQQIAWAAPQLHAIRSDPYWHGGDYYDRPGPGPVTGMGIARRIAHITYRGATEFDERFGRNPQDGEDPMAGGRAAVESYLDHHAVKLARRFDAGSYVVLTQAMNTHDVGRGRGGVAQALRRVTARTMVAGVSSDFLYPLAQQQELADGIPGADEVRVIESASGHDGFLTEINQVSVLIKELLAQ

SEQ ID NO: 282 - protein, 452 aa, Thermobifida fusca
MALRPDRSIMTAEDTTPESTAADKWSFETKQIHAGAAPDPATNARATPIYQTTSYVFRDTQHGADLFSLAEPGNIYTRIMNPTQDVLEKRVAALEGGVAAVAFASGSAAITAAVLNLAGAGDHIVSSPSLYGGTYNLFRYTLPKLGIEVTFIKDQDDLDEWRAAARDNTKLFFAETLPNPANNVLDVRAVADVAHEVGVPLMVDNTVPTPYLQRPIDHGADIVVHSATKFLGGHGTTIAGIVVDAGTFDFGAHGDRFPGFVEPDPSYHGLKYWEALGPGAYAAKLRVQLLRDTGAAISPFNSFLILQGIETLSLRMERHVANAQALAEWLESRDEVAKVYYPGLPSSPYYEAAKKYLPKGAGAIVSFELHGGIEAGRAAVDGTELFSQLVNIGDVRSLIVHPASTTHSQLTPEEQLASGVTPGLVRLSVGLEHVDDLRADLEAGLRAAKAYQ

SEQ ID NO: 283 - protein, 437 aa, Corynebacterium glutamicum
MPKYDNSNADQWGFETRSIHAGQSVDAQTSARNLPIYQSTAFVFDSAEHAKQRFALEDLGPVYSRLTNPTVEALENRIASLEGGVHAVAFSSGQAATTNAILNLAGAGDHIVTSPRLYGGTETLFLITLNRLGIDVSFVENPDDPESWQAAVQPNTKAFFGETFANPQADVLDIPAVAEVAHRNSVPLIIDNTIATAALVRPLELGADVVVASLTKFYTGNGSGLGGVLIDAGKFDWTVEKDGKPVFPYFVTPDAAYHGLKYADLGAPAFGLKVRVGLLRDTGSTLSAFNAWAAVQGIDTLSLRLERHNENAIKVAEFLNNHEKVEKVNFAGLKDSPWYATKEKLGLKYTGSVLTFEIKGGKDEAWAFIDALKLHSNLANIGDVRSLVVHPATTTHSQSDEAGLARAGVTQSTVRLSVGIETIDDIIADLEGGFAAI

SEQ ID NO: 284 - protein, 452 aa, Thermobifida fusca
MALRPDRSIMTAEDTTPESTAADKWSFETKQIHAGAAPDPATNARATPIYQTTSYVFRDTQHGADLFSLAEPGNIYTRIMNPTQDVLEKRVAALEGGVAAVAFASGSAAITAAVLNLAGAGDHIVSSPSLYGGTYNLFRYTLPKLGIEVTFIKDQDDLDEWRAAARDNTKLFFAETLPNPANNVLDVRAVADVAHEVGVPLMVDNTVPTPYLQRPIDHGADIVVHSATKFLGGHGTTIAAIVVDAGTFDFGAHGDRFPGFVEPDPSYHGLKYWEALGPGAYAAKLRVQLLRDTGAAISPFNSFLILQGIETLSLRMERHVANAQALAEWLESRDEVAKVYYPGLPSSPYYEAAKKYLPKGAGAIVSFELHGGIEAGRAFVDGTELFSQLVNIGDVRSLIVHPASTTHSQLTPEEQLASGVTPGLVRLSVGLEHVDDLRADLEAGLRAAKAYQ

SEQ ID NO: 285 - protein, 379 aa, Thermobifida fusca
MSHDTTPPLPATGAWREGDPPGDRRWVELSEPLPLETGGELPGVRLAYETWGSLNEDRSNAVLVLHALTGDSHVVGPEGPAHPSPGWWEGIIGPGLALDTDRYFVVAPNVLGGCQGSTGPSSTAPDGRPWGSRFPRITIRDTVRAEFALLREFGIHSWAAVLGGSMGGMRALEWAATYPERVRRLLLLASPAASSAQQIAWAAPQLHAIRSDPYWHGGDYYDRPGPGPVTGMGIARRIAHITYRGATEFDERFGRNPQDGEDPMAGGRFAVESYLDHHAVKLARRFDAGSYVVLTQAMNTHDVGRGRGGVAQALRRVTARTMVAGVSSDFLYPLAQQQELADGIPGADEVRVIESASGHDGFLTEINQVSVLIKELLAQ

SEQ ID NO: 286 - protein, 377 aa, Corynebacterium glutamicum
MPTLAPSGQLEIQAIGDVSTEAGAIITNAEIAYHRWGEYRVDKEGRSNVVLIEHALTGDSNAADWWADLLGPGKAINTDIYCVICTNVIGGCNGSTGPGSMHPDGNFWGNRFPATSIRDQVNAEKQFLDALGITTVAAVLGGSMGGARTLEWAAMYPETVGAAAVLAVSARASAWQIGIQSAQIKAIENDHHWHEGNYYESGCNPATGLGAARRIAHLTYRGELEIDERFGTAAQKNENPLGPYRKPDQRFAVESYLDYQADKLVQRFDAGSYVLLTDALNRHDIGRDRGGLNKALESIKVPVLVAGVDTDILYPYHQQEHLSRNLGNLLAMAKIVSPVGHDAFLTESRQMDRIVRNFFSLISPDEDNPSTYIEFYI

SEQ ID NO: 287 - protein, 521 aa, Micobacterium smegmatis
MVDGFLRRPQGKRGSAGSGPRETGKPDGGQPCVVVREPFTPTRGVHLYVRTRVRLALGAGRPAAFTPHSPPSSRRRPSMTTPDPTENWSFETKQIHAGQSPDSATHARALPIYQTTSYTFDDTSHAAALFGLEVPGNIYTRIGNPTTDVVEQRIAALEGGVAALFLSSGQAAETFAILNIAKAGDHIVSSPRLYGGTYNLLHYTLPKLGIETTFVENPDDLESWRAAVRPNTKAFFAETISNPQIDILDIPNVAAIAHEAGVPLIVDNTIATPYLIQPIAHGADIVVHSATKYLGGHGSAIAGVIVDGGTFDWTNGKFPGFTEPDPSYHGVVFAELGAPAYALKARVQLLRDLGSAAAPFNAFLIAQGLETLSLRVERHVANAQKVAEFLENHPDVSSVNYAGLPSSPWYELGRKLAPKGTGAVLAFELSGGLEAGKAFVNALTLHSHVANIGDVRSLVIHPASTTHQQLSPEEQLSTGVTPGLVRLAVGLEGIDDIIADLEQGFAAARPFSGAAQTAQTV

SEQ ID NO: 288 - protein, 437 aa, Corynebacterium glutamicum
MPKYDNSNADQWGFETRSIHAGQSVDAQTSARNLPIYQSTAFVFDSAEHAKQRFALEDLGPVYSRLTNPTVEALENRIASLEGGVHAVAFSSGQAATTNAILNLAGAGDHIVTSPRLYGGTETLFLITLNRLGIDVSFVENPDDPESWQAAVQPNTKAFFGETFANPQADVLDIPAVAEVAHRNSVPLIIDNTIATAALVRPLELGADVVVASLTKFYTGNGSGLGGVLIAGGKFDWTVEKDGKPVFPYFVTPDAAYHGLKYADLGAPAFGLKVRVGLLRDTGSTLSAFNAWAAVQGIDTLSLRLERHNENAIKVAEFLNNHEKVEKVNFAGLKDSPWYATKEKLGLKYTGSVLTFEIKGGKDEAWAFIDALKLHSNLANIGDVRSLVVHPATTTHSQSDEAGLARAGVTQSTVRLSVGIETIDDIIADLEGGFAAI

SEQ ID NO: 289 - protein, 452 aa, Thermobifida fusca
MALRPDRSIMTAEDTTPESTAADKWSFETKQIHAGAAPDPATNARATPIYQTTSYVFRDTQHGADLFSLAEPGNIYTRIMNPTQDVLEKRVAALEGGVAAVAFASGSAAITAAVLNLAGAGDHIVSSPSLYGGTYNLFRYTLPKLGIEVTFIKDQDDLDEWRAAARDNTKLFFAETLPNPANNVLDVRAVADVAHEVGVPLMVDNTVPTPYLQRPIDHGADIVVHSATKFLGGHGTTIAGIVVAAGTFDFGAHGDRFPGFVEPDPSYHGLKYWEALGPGAYAAKLRVQLLRDTGAAISPFNSFLILQGIETLSLRMERHVANAQALAEWLESRDEVAKVYYPGLPSSPYYEAAKKYLPKGAGAIVSFELHGGIEAGRAFVDGTELFSQLVNIGDVRSLIVHPASTTHSQLTPEEQLASGVTPGLVRLSVGLEHVDDLRADLEAGLRAAKAYQ

SEQ ID NO: 290 - protein, 379 aa, Thermobifida fusca
MSHDTTPPLPATGAWREGDPPGDRRWVELSEPLPLETGGELPGVRLAYETWGSLNEDRSNAVLVLHALTGDSHVVGPEGPGHPSPGWWEGIIGPGLALDTDRYFVVAPNVLGGCQGSTGPSSTAPDGRPWGSRFPRITIRDTVRAEFALLREFGIHSWAAVLGGSMGGMRALEWAATYPERVRRLLLLASPAASSAQQIAWAAPQLHAIRSDPYWHGGDYYDRPGPGPVTGMGIARRIAHITYRGATEFDERFGRNPQDGEDPMAGGRFAVESYLDHHAVKLARRFAAGSYVVLTQAMNTHDVGRGRGGVAQALRRVTARTMVAGVSSDFLYPLAQQQELADGIPGADEVRVIESASGHDGFLTEINQVSVLIKELLAQ

SEQ ID NO: 291 - protein, 452 aa, Thermobifida fusca
MALRPDRSIMTAEDTTPESTAADKWSFETKQIHAGAAPDPATNARATPIYQTTSYVFRDTQHGADLFSLAEPGNIYTRIMNPTQDVLEKRVAALEGGVAAVAFASGSAAITAAVLNLAGAGDHIVSSPSLYGGTYNLFRYTLPKLGIEVTFIKDQDDLDEWRAAARDNTKLFFAETLPNPANNVLDVRAVADVAHEVGVPLMVDNTVPTPYLQRPIDHGADIVVHSATKFLGGHGTTIAGIVVDAGTFDFGAHGDRFPGFVEPDPSYHGLKYWEALGPGAYAAKLRVQLLRDTGAAISPFNSFLILQGIETLSLRMERHVANAQALAEWLESRDEVAKVYYPGLPSSPYYEAAKKYLPKGAGAIVSFELHGGIEAGRAFVDGTELFSQLVNIGAVRSLIVHPASTTHSQLTPEEQLASGVTPGLVRLSVGLEHVDDLRADLEAGLRAAKAYQ

SEQ ID NO: 292 - protein, 610 aa, Corynebacterium  glutamicum
MTTAAIRGLQGEAPTKNKELLNWIADAVELFQPEAVVFVDGSQAEWDRMAEDLVEAGTLIKLNEEKRPNSYLARSNPSDVARVESRTFICSEKEEDAGPTNNWAPPQAMKDEMSKHYAGSMKGRTMYVVPFCMGPISDPDPKLGVQLTDSEYVVMSMRIMTRMGIEALDKIGANGSFVRCLHSVGAPLEPGQEDVAWPCNDTKYITQFPETKEIWSYGSGYGGNAILAKKCYALRIASVMAREEGWMAEHMLILKLINPEGKAYHIAAAFPSACGKTNLAMITPTIPGWTAQVVGDDIAWLKLREDGLYAVNPENGFFGVAPGTNYASNPIAMKTMEPGNTLFTNVALTDDGDIWWEGMDGDAPAHLIDWMGNDWTPESDENAAHPNSRYCVAIDQSPAAAPEFNDWEGVKIDAILFGGRRADTVPLVTQTYDWEHGTMVGALLASGQTAASAEAKVGTLRHDPMAMLPFIGYNAGEYLQNWIDMGNKGGDKMPSIFLVNWFRRGEDGRFLWPGFGDNSRVLKWVIDRIEGHVGADETVVGHTAKAEDLDLDGLDTPIEDVKEALTAPAEQWANDVEDNAEYLTFLGPRVPAEVHSQFDALKARISAAHA

SEQ ID NO: 293 - protein, 540 aa, Escherichia coli
MRVNNGLTPQELEAYGISDVHDIVYNPSYDLLYQEELDPSLTGYERGVLTNLGAVAVDTGIFTGRSPKDKYIVRDDTTRDTFWWADKGKGKNDNKPLSPETWQHLKGLVTRQLSGKRLFVVDAFCGANPDTRLSVRFITEVAWQAHFVKNMFIRPSDEELAGFKPDFIVMNGAKCTNPQWKEQGLNSENFVAFNLTERMQLIGGTWYGGEMKKGMFSMMNYLLPLKGIASMHCSANVGEKGDVAVFFGLSGTGKTTLSTDPKRRLIGDDEHGWDDDGVFNFEGGCYAKTIKLSKEAEPEIYNAIRRDALLENVTVREDGTIDFDDGSKTENTRVSYPIYHIDNIVKPVSKAGHATKVIFLTADAFGVLPPVSRLTADQTQYHFLSGFTAKLAGTERGITEPTPTFSACFGAAFLSLHPTQYAEVLVKRMQAAGAQAYLVNTGWNGTGKRISIKDTRAIIDAILNGSLDNAETFTLPMFNLAIPTELPGVDTKILDPRNTYASPEQWQEKAETLAKLFIDNFDKYTDTPAGAALVAAGPKL

SEQ ID NO: 294 - DNA, 1134 bp, Corynebacterium  glutamicum
atgcccaccctcgcgccttcaggtcaacttgaaatccaagcgatcggtgatgtctccaccgaagccggagcaatcattacaaacgctgaaatcgcctatcaccgctggggtgaataccgcgtagataaagaaggacgcagcaatgtcgttctcatcgaacacgccctcactggagattccaacgcagccgattggtgggctgacttgctcggtcccggcaaagccatcaacactgatatttactgcgtgatctgtaccaacgtcatcggtggttgcaacggttccaccggacctggctccatgcatccagatggaaatttctggggtaatcgcttccccgccacgtccattcgtgatcaggtaaacgccgaaaaacaattcctcgacgcactcggcatcaccacggtcgccgcagtacttggtggttccatgggtggtgcccgcaccctagagtgggccgcaatgtacccagaaactgttggcgcagctgctgttcttgcagtttctgcacgcgccagcgcctggcaaatcggcattcaatccgcccaaattaaggcgattgaaaacgaccaccactggcacgaaggcaactactacgaatccggctgcaacccagccaccggactcggcgccgcccgacgcatcgcccacctcacctaccgtggcgaactagaaatcgacgaacgcttcggcaccgcagcccaaaagaacgaaaacccactcggtccctaccgcaagcccgaccagcgcttcgccgtggaatcctacttggactaccaagcagacaagctagtacagcgtttcgacgccggctcctacgtcttgctcaccgacgccctcaaccgccacgacattggtcgcgaccgcggaggcctcaacaaggcactcgaatccatcaaagttccagtccttgtcgcaggcgtagataccgatattttgtacccctaccaccagcaagaacacctctccagaaacctgggaaatctactggcaatggcaaaaatcgtatcccctgtcggccacgatgctttcctcaccgaaagccgccaaatggatcgcatcgtgaggaacttcttcagcctcatctccccagacgaagacaacccttcgacctacatcgagttctacatctaa

SEQ ID NO: 295 - DNA, 1314 bp, Corynebacterium  glutamicum
atgccaaagtacgacaattccaatgctgaccagtggggctttgaaacccgctccattcacgcaggccagtcagtagacgcacagaccagcgcacgaaaccttccgatctaccaatccaccgctttcgtgttcgactccgctgagcacgccaagcagcgtttcgcacttgaggatctaggccctgtttactcccgcctcaccaacccaaccgttgaggctttggaaaaccgcatcgcttccctcgaaggtggcgtccacgctgtagcgttctcctccggacaggccgcaaccaccaacgccattttgaacctggcaggagcgggcgaccacatcgtcacctccccacgcctctacggtggcaccgagactctattccttatcactcttaaccgcctgggtatcgatgtttccttcgtggaaaaccccgacgaccctgagtcctggcaggcagccgttcagccaaacaccaaagcattcttcggcgagactttcgccaacccacaggcagacgtcctggatattcctgcggtggctgaagttgcgcaccgcaacagcgttccactgatcatcgacaacaccatcgctaccgcagcgctcgtgcgcccgctcgagctcggcgcagacgttgtcgtcgcttccctcaccaagttctacaccggcaacggctccggactgggcggcgtgcttatcgccggcggaaagttcgattggactgtcgaaaaggatggaaagccagtattcccctacttcgtcactccagatgctgcttaccacggattgaagtacgcagaccttggtgcaccagccttcggcctcaaggttcgcgttggccttctacgcgacaccggctccaccctctccgcattcaacgcatgggctgcagtccagggcatcgacaccctttccctgcgcctggagcgccacaacgaaaacgccatcaaggttgcagaattcctcaacaaccacgagaaggtggaaaaggttaacttcgcaggcctgaaggattccccttggtacgcaaccaaggaaaagcttggcctgaagtacaccggctccgttctcaccttcgagatcaagggcggcaaggatgaggcttgggcatttatcgacgccctgaagctacactccaaccttgcaaacatcggcgatgttcgctccctcgttgttcacccagcaaccaccacccattcacagtccgacgaagctggcctggcacgcgcgggcgttacccagtccaccgtccgcctgtccgttggcatcgagaccattgatgatatcatcgctgacctcgaaggcggctttgctgcaatctag

SEQ ID NO: 296 - DNA, 1314 bp, Corynebacterium  glutamicum
atgccaaagtacgacaattccaatgctgaccagtggggctttgaaacccgctccattcacgcaggccagtcagtagacgcacagaccagcgcacgaaaccttccgatctaccaatccaccgctttcgtgttcgactccgctgagcacgccaagcagcgtttcgcacttgaggatctaggccctgtttactcccgcctcaccaacccaaccgttgaggctttggaaaaccgcatcgcttccctcgaaggtggcgtccacgctgtagcgttctcctccggacaggccgcaaccaccaacgccattttgaacctggcaggagcgggcgaccacatcgtcacctccccacgcctctacggtggcaccgagactctattccttatcactcttaaccgcctgggtatcgatgtttccttcgtggaaaaccccgacgaccctgagtcctggcaggcagccgttcagccaaacaccaaagcattcttcggcgagactttcgccaacccacaggcagacgtcctggatattcctgcggtggctgaagttgcgcaccgcaacagcgttccactgatcatcgacaacaccatcgctaccgcagcgctcgtgcgcccgctcgagctcggcgcagacgttgtcgtcgcttccctcaccaagttctacaccggcaacggctccggactgggcggcgtgcttatcgacgccggaaagttcgattggactgtcgaaaaggatggaaagccagtattcccctacttcgtcactccagatgctgcttaccacggattgaagtacgcagaccttggtgcaccagccttcggcctcaaggttcgcgttggccttctacgcgacaccggctccaccctctccgcattcaacgcatgggctgcagtccagggcatcgacaccctttccctgcgcctggagcgccacaacgaaaacgccatcaaggttgcagaattcctcaacaaccacgagaaggtggaaaaggttaacttcgcaggcctgaaggattccccttggtacgcaaccaaggaaaagcttggcctgaagtacaccggctccgttctcaccttcgagatcaagggcggcaaggatgaggcttgggcatttatcgacgccctgaagctacactccaaccttgcaaacatcggcgatgttcgctccctcgttgttcacccagcaaccaccacccattcacagtccgacgaagctggcctggcacgcgcgggcgttacccagtccaccgtccgcctgtccgttggcatcgagaccattgatgatatcatcgctgacctcgaaggcggctttgctgcaatctag

SEQ ID NO: 297 - DNA, 1476 bp, Escherichia coli
ctagctacgttgacaccatcgaatggtgcaaaacctttcgcggtatggcatgatagcgcccggaagagagtcaattcagggtggtgaatgtgaaaccagtaacgttatacgatgtcgcagagtatgccggtgtctcttatcagaccgtttcccgcgtggtgaaccaggccagccacgtttctgcgaaaacgcgggaaaaagtggaagcggcgatggcggagctgaattacattcccaaccgcgtggcacaacaactggcgggcaaacagtcgttgctgattggcgttgccacctccagtctggccctgcacgcgccgtcgcaaattgtcgcggcgattaaatctcgcgccgatcaactgggtgccagcgtggtggtgtcgatggtagaacgaagcggcgtcgaagcctgtaaagcggcggtgcacaatcttctcgcgcaacgcgtcagtgggctgatcattaactatccgctggatgaccaggatgccattgctgtggaagctgcctgcactaatgttccggcgttatttcttgatgtctctgaccagacacccatcaacagtattattttctcccatgaagacggtacgcgactgggcgtggagcatctggtcgcattgggtcaccagcaaatcgcgctgttagcgggcccattaagttctgtctcggcgcgtctgcgtctggctggctggcataaatatctcactcgcaatcaaattcagccgatagcggaacgggaaggcgactggagtgccatgtccggttttcaacaaaccatgcaaatgctgaatgagggcatcgttcccactgcgatgctggttgccaacgatcagatggcgctgggcgcaatgcgcgccattaccgagtccgggctgcgcgttggtgcggatatctcggtagtgggatacgacgataccgaagacagctcatgttatatcccgccgttaaccaccatcaaacaggattttcgcctgctggggcaaaccagcgtggaccgcttgctgcaactctctcagggccaggcggtgaagggcaatcagctgttgcccgtctcactggtgaaaagaaaaaccaccctggcgcccaatacgcaaaccgcctctccccgcgcgttggccgattcattaatgcagctggcacgacaggtttcccgactggaaagcgggcagtgagcgcaacgcaattaatgtgagttagcgcgaattgatctggtttgacagcttatcatcgactgcacggtgcaccaatgcttctggcgtcaggcagccatcggaagctgtggtatggctgtgcaggtcgtaaatcactgcataattcgtgtcgctcaaggcgcactcccgttctggataatgttttttgcgccgacatcataacggttctggcaaatattctgaaatgagctgttgacaattaatcatccggctcgtataatgtgtggaattgtgagcggataacaatttcacacaggaaacagac

SEQ ID NO: 298 - DNA, 1494 bp, Artificial Sequence
  Synthetically generated oligonucleotide
ctagctacgttgacaccatcgaatggtgcaaaacctttcgcggtatggcatgatagcgcccggaagagagtcaattcagggtggtgaatgtgaaaccagtaacgttatacgatgtcgcagagtatgccggtgtctcttatcagaccgtttcccgcgtggtgaaccaggccagccacgtttctgcgaaaacgcgggaaaaagtggaagcggcgatggcggagctgaattacattcccaaccgcgtggcacaacaactggcgggcaaacagtcgttgctgattggcgttgccacctccagtctggccctgcacgcgccgtcgcaaattgtcgcggcgattaaatctcgcgccgatcaactgggtgccagcgtggtggtgtcgatggtagaacgaagcggcgtcgaagcctgtaaagcggcggtgcacaatcttctcgcgcaacgcgtcagtgggctgatcattaactatccgctggatgaccaggatgccattgctgtggaagctgcctgcactaatgttccggcgttatttcttgatgtctctgaccagacacccatcaacagtattattttctcccatgaagacggtacgcgactgggcgtggagcatctggtcgcattgggtcaccagcaaatcgcgctgttagcgggcccattaagttctgtctcggcgcgtctgcgtctggctggctggcataaatatctcactcgcaatcaaattcagccgatagcggaacgggaaggcgactggagtgccatgtccggttttcaacaaaccatgcaaatgctgaatgagggcatcgttcccactgcgatgctggttgccaacgatcagatggcgctgggcgcaatgcgcgccattaccgagtccgggctgcgcgttggtgcggatatctcggtagtgggatacgacgataccgaagacagctcatgttatatcccgccgttaaccaccatcaaacaggattttcgcctgctggggcaaaccagcgtggaccgcttgctgcaactctctcagggccaggcggtgaagggcaatcagctgttgcccgtctcactggtgaaaagaaaaaccaccctggcgcccaatacgcaaaccgcctctccccgcgcgttggccgattcattaatgcagctggcacgacaggtttcccgactggaaagcgggcagtgagcgcaacgcaattaatgtgagttagcgcgaattgatctggtttgacagcttatcatcgactgcacggtgcaccaatgcttctggcgtcaggcagccatcggaagctgtggtatggctgtgcaggtcgtaaatcactgcataattcgtgtcgctcaaggcgcactcccgttctggataatgttttttgcgccgacatcataacggttctggcaaatattctgaaatgagctgttgacaattaatcatccggctcgtataatgtgtggaattgtgagcggataacaatttcacacaggaaacagagaattcaaaggaggacaac

SEQ ID NO: 299 - DNA, 482 bp, Corynebacterium  glutamicum
ctagcctaaaaacgaccgagcctattgggattaccattgaagccagtgtgagttgcatcacattggcttcaaatctgagactttaatttgtggattcacgggggtgtaatgtagttcataattaaccccattcgggggagcagatcgtagtgcgaacgatttcaggttcgttccctgcaaaaactatttagcgcaagtgttggaaatgcccccgtttggggtcaatgtccatttttgaatgtgtctgtatgattttgcatctgctgcgaaatctttgtttccccgctaaagttgaggacaggttgacacggagttgactcgacgaattatccaatgtgagtaggtttggtgcgtgagttggaaaaattcgccatactcgcccttgggttctgtcagctcaagaattcttgagtgaccgatgctctgattgacctaactgcttgacacattgcatttcctacaatctttagaggagacacaac

SEQ ID NO: 300 - DNA, 327 bp, Corynebacterium  glutamicum
ctagcggggttgctgcactttttaaaaaggcaaaaaatagcgaaaacacaccccaggtttttcccgtaaccccgctaggctatgcaatttcggtttaacccagtttttcaaagaaggtcactagcttttccgctggtcaccttctttttggtttttcaacgcagagatagtacactttactctttgtgtgtggagtcaaacctcccctttaaggggtgcgcttggacagcaggacaaattcgggtcaccaccggccgccgaatttagcttccttccgaacatattcctggctggcagttctagaccgactaattcaaggagtcattc

SEQ ID NO: 301 - DNA, 514 bp, Corynebacterium  glutamicum
ctagctatttcagtgcggggcagtgaaagtaaaaacgcaactttcttacagaacagggttgtctttcagacgactatgtggttaactacttgggctgctttaacacggcgtgaattaaccatgccagttggtaaggcaaacatgacaccttcaattggagtcgaggcgcatgaaaatgcacttcaacttcagggggtatccactgaagccgggtgactggtgaaggcggaaccggagaaggggcatggcaaataaacagcggcagttacgttagggcctagatcacgcattttggtcccttccgatttccctgacttcattgttgggttcatcgtggagcgttttatttgtacagcgcccgtgatccaatgtcagaagcatttgacaggtcaggttaaacactggcgttgcgcccgagccccaagcccggacaacgttatagagaaagaatgaagcgaattcccaccgcttttccaaaatggaagatgtgggacgagcgaggaagaggataagc

SEQ ID NO: 302 - DNA, 23 bp, Artificial Sequence
  Primer
ccgtgagctgctcggatgtgacg

SEQ ID NO: 303 - DNA, 27 bp, Artificial Sequence
  Primer
tcagaggtcggcggccaacagttctgc

SEQ ID NO: 304 - DNA, 20 bp, Artificial Sequence
  Primer
accgcactttcccgagtgac

SEQ ID NO: 305 - DNA, 20 bp, Artificial Sequence
  Primer
tcatcgtccgctcttcccct

SEQ ID NO: 306 - DNA, 20 bp, Artificial Sequence
  Primer
atggctccgacctccactcc

SEQ ID NO: 307 - DNA, 20 bp, Artificial Sequence
  Primer
cgtgcagaagcagttgtcgt

SEQ ID NO: 308 - DNA, 20 bp, Artificial Sequence
  Primer
tgaggtccgagggagggaaa

SEQ ID NO: 309 - DNA, 20 bp, Artificial Sequence
  Primer
ttactctccttcaacccgca

SEQ ID NO: 310 - DNA, 20 bp, Artificial Sequence
  Primer
catcgactacgcccgtgtga

SEQ ID NO: 311 - DNA, 20 bp, Artificial Sequence
  Primer
tggctgttcttcaccgcacc

SEQ ID NO: 312 - DNA, 20 bp, Artificial Sequence
  Primer
ttgacctgacgcttatagcg

SEQ ID NO: 313 - DNA, 20 bp, Artificial Sequence
  Primer
cctgtacaaaatgttgggag

SEQ ID NO: 314 - DNA, 22 bp, Artificial Sequence
  Primer
atgaatgaacaatattccgcca

SEQ ID NO: 315 - DNA, 20 bp, Artificial Sequence
  Primer
ttagccggtattgcgcatcc

SEQ ID NO: 316 - DNA, 34 bp, Artificial Sequence
  Primer
ggcaagaccgacatcatattcacgtgtgcgcgtg

SEQ ID NO: 317 - DNA, 34 bp, Artificial Sequence
  Primer
cacgcgcacacgtgaatatgatgtcggtcttgcc

SEQ ID NO: 318 - DNA, 36 bp, Artificial Sequence
  Primer
ggtgctgcagaacatctacaagatcgaggacggcaa

SEQ ID NO: 319 - DNA, 36 bp, Artificial Sequence
  Primer
ttgccgtcctcgatcttgtagatgttctgcagcacc

SEQ ID NO: 320 - DNA, 33 bp, Artificial Sequence
  Primer
gacgttcccggctacgccgccaaggtgttccgc

SEQ ID NO: 321 - DNA, 33 bp, Artificial Sequence
  Primer
gcggaacaccttggcggcgtagccgggaacgtc

SEQ ID NO: 322 - DNA, 35 bp, Artificial Sequence
  Primer
gtacgacgaccacatcgacaaggtgtcgctgatcg

SEQ ID NO: 323 - DNA, 35 bp, Artificial Sequence
  Primer
cgatcagcgacaccttgtcgatgtggtcgtcgtac

SEQ ID NO: 324 - DNA, 35 bp, Artificial Sequence
  Primer
cgggcctgacggacatcrtcttcacgctccccaag

SEQ ID NO: 325 - DNA, 35 bp, Artificial Sequence
  Primer
cttggggagcgtgaagaygatgtccgtcaggcccg

SEQ ID NO: 326 - DNA, 33 bp, Artificial Sequence
  Primer
gtcgtgcagaacgtgtacgccgcctccacgggc

SEQ ID NO: 327 - DNA, 33 bp, Artificial Sequence
  Primer
gcccgtggaggcggcgtacacgttctgcacgac

SEQ ID NO: 328 - DNA, 26 bp, Artificial Sequence
  Primer
gtcgacgcgtcttaaggcatgcaagc

SEQ ID NO: 329 - DNA, 23 bp, Artificial Sequence
  Primer
cgacaaaccggaagtgctcgccc

SEQ ID NO: 330 - DNA, 33 bp, Artificial Sequence
  Primer
ttcatcgaacagcgctcgcacctgctgaccgcc

SEQ ID NO: 331 - DNA, 33 bp, Artificial Sequence
  Primer
ggcggtcagcaggtgcgagcgctgttcgatgaa

SEQ ID NO: 332 - DNA, 34 bp, Artificial Sequence
  Primer
cacacgaagacaccatgatgcgtacgcgtccgct

SEQ ID NO: 333 - DNA, 36 bp, Artificial Sequence
  Primer
ataagaatgcggccgcttactctccttcaacccgca

SEQ ID NO: 334 - DNA, 39 bp, Artificial Sequence
  Primer
cacacacctgccacacatgagtcacgacaccacccctcc

SEQ ID NO: 335 - DNA, 36 bp, Artificial Sequence
  Primer
ataagaatgcggccgcttactgcgccagcagttctt

SEQ ID NO: 336 - DNA, 35 bp, Artificial Sequence
  Primer
cacaggtctcccatggcactgcgtcctgacaggag

SEQ ID NO: 337 - DNA, 36 bp, Artificial Sequence
  Primer
ataagaatgcggccgctcactggtatgccttggctg

SEQ ID NO: 338 - DNA, 31 bp, Artificial Sequence
  Primer
cacacacatgtcactgcgtcctgacaggagc

SEQ ID NO: 339 - DNA, 36 bp, Artificial Sequence; identical to SEQ ID NO: 335
  Primer

SEQ ID NO: 340 - DNA, 39 bp, Artificial Sequence
  Synthetically generated oligonucleotide
gtaggcccggaaggccccgcgcaccccagcccaggctgg

SEQ ID NO: 341 - DNA, 39 bp, Artificial Sequence
  Synthetically generated oligonucleotide
ccagcctgggctggggtgcgcggggccttccgggcctac

SEQ ID NO: 342 - DNA, 39 bp, Artificial Sequence
  Synthetically generated oligonucleotide
ccgatggccgggggccgggccgctgtcgagtcgtacctg

SEQ ID NO: 343 - DNA, 39 bp, Artificial Sequence
  Synthetically generated oligonucleotide
caggtacgactcgacagcggcccggcccccggccatcgg

SEQ ID NO: 344 - DNA, 39 bp, Artificial Sequence
  Synthetically generated oligonucleotide
aaactcgcccgccggttcgccgcgggcagctacgtcgtg

SEQ ID NO: 345 - DNA, 39 bp, Artificial Sequence
  Synthetically generated oligonucleotide
cacgacgtagctgcccgcggcgaaccggcgggcgagttt

SEQ ID NO: 346 - DNA, 39 bp, Artificial Sequence
  Synthetically generated oligonucleotide
cacggcaccacgatcgcggccatcgtggtggacgccggc

SEQ ID NO: 347 - DNA, 39 bp, Artificial Sequence
  Synthetically generated oligonucleotide
gccggcgtccaccacgatggccgcgatcgtggtgccgtg

SEQ ID NO: 348 - DNA, 39 bp, Artificial Sequence
  Synthetically generated oligonucleotide
atcgcgggcatcgtggtggccgccggcaccttcgacttc

SEQ ID NO: 349 - DNA, 39 bp, Artificial Sequence
  Synthetically generated oligonucleotide
gaagtcgaaggtgccggcggccaccacgatgcccgcgat

SEQ ID NO: 350 - DNA, 39 bp, Artificial Sequence
  Synthetically generated oligonucleotide
atcgaggccggacgcgccgccgtggacggcaccgaactg

SEQ ID NO: 351 - DNA, 39 bp, Artificial Sequence
  Synthetically generated oligonucleotide
cagttcggtgccgtccacggcggcgcgtccggcctcgat

SEQ ID NO: 352 - DNA, 39 bp, Artificial Sequence
  Synthetically generated oligonucleotide
cagctcgtcaacatcggtgccgtgcgcagcctcatcgtc

SEQ ID NO: 353 - DNA, 39 bp, Artificial Sequence
  Synthetically generated oligonucleotide
gacgatgaggctgcgcacggcaccgatgttgacgagctg

SEQ ID NO: 354 - DNA, 39 bp, Artificial Sequence
  Synthetically generated oligonucleotide
gacgaacgcttcggcaccgcagcccaaaagaacgaaaac

SEQ ID NO: 355 - DNA, 39 bp, Artificial Sequence
  Synthetically generated oligonucleotide
gttttcgttcttttgggctgcggtgccgaagcgttcgtc

SEQ ID NO: 356 - DNA, 39 bp, Artificial Sequence
  Synthetically generated oligonucleotide
ctgggcggcgtgcttatcgccggcggaaagttcgattgg

SEQ ID NO: 357 - DNA, 39 bp, Artificial Sequence
  Synthetically generated oligonucleotide
ccaatcgaactttccgccggcgataagcacgccgcccag

SEQ ID NO: 358 - DNA, 39 bp, Artificial Sequence
  Synthetically generated oligonucleotide
ggcggcgtgcttatcgacgccggaaagttcgattggact

SEQ ID NO: 359 - DNA, 39 bp, Artificial Sequence
  Synthetically generated oligonucleotide
agtccaatcgaactttccggcgtcgataagcacgccgcc

SEQ ID NO: 360 - protein, 54 aa, Artificial Sequence
  Synthetically generated peptide
  VARIANT 2, 4-13, 27, 29-33: Xaa = any amino acid
  VARIANT 28: Xaa = Val, Asp, Gly, Ile or Leu
  VARIANT 14-25, 34-53: Xaa = any amino acid or absent
GXKXXXXXXXXXXXXXXXXXXXXXXFXXXXXXXXXXXXXXXXXXXXXXXXXXXD

SEQ ID NO: 361 - protein, 11 aa, Artificial Sequence
  Synthetically generated peptide
  VARIANT 2, 3, 6: Xaa = any amino acid
  VARIANT 8: Xaa = Val, Leu, Ile or Asp
  VARIANT 11: Xaa = Val, Leu, ILe, Phe, or Met
LXXGGXFXXXX

SEQ ID NO: 362 - protein, 28 aa, Artificial Sequence
  Synthetically generated peptide
  VARIANT 2, 4-13: Xaa = any amino acid
  VARIANT 14-25: Xaa = any amino acid or absent
  VARIANT 28: Xaa = Val, Asp, Gly, Ile, or Leu
GXKXXXXXXXXXXXXXXXXXXXXXXFXX

SEQ ID NO: 363 - protein, 213 aa, Corynebacterium glutamicum
MAASASGKSKTSAGANRRRNRPSPRQRLLDSATNLFTTEGIRVIGIDRILREADVAKASLYSLFGSKDALVIAYLENLDQLWREAWRERTVGMKDPEDKIIAFFDQCIEEEPEKDFRGSHFQNAASEYPRPETDSEKGIVAAVLEHREWCHKTLTDLLTEKNGYPGTTQANQLLVFLDGGLAGSRLVHNISPLETARDLARQLLSAPPADYSI

SEQ ID NO: 364 - protein, 309 aa, Corynebacterium glutamicum
MAIELNVGRKVTVTVPGSSANLGPGFDTLGLALSVYDTVEVEIIPSGLEVEVFGEGQGEVPLDGSHLVVKAIRAGLKAADAEVPGLRVVCHNNIPQSRGLGSSAAAAVAGVAAANGLADFPLTQEQIVQLSSAFEGHPDNAAASVLGGAVVSWTNLSIDGKSQPQYAAVPLEVQDNIRATALVPNFHASTEAVRRVLPTEVTHIDARFNVSRVAVMIVALQQRPDLLWEGTRDRLHQPYRAEVLPITSEWVNRLRNRGYAAYLSGAGPTAMVLSTEPIPDKVLEDARESGIKVLELEVAGPVKVEVNQP
